United States Patent Application Publication US 2008/0072348 A1 - sequence listing, part 2

SEQ ID NO: 6653 - DNA, 261 bp, Glycine max
  Clone ID: 701098782H2
ctcgagccgtgcttgccgtgcttgacattaaatggtctggcattgagctggaagaatggtcgagaaatgagcagttttggctgattggagggaccagtgcccatctagctgcggtgcttcaaggtttgctcaaagtcatagcagggattgacatatcattcaccttgacttcaaaatctggtggtgatgatgtagatgatgagtttgctgatctctatattgtgaaatggacatcccttatgataccacctatcacaatta

SEQ ID NO: 6654 - DNA, 259 bp, Glycine max
  Clone ID: 701098785H2
cgctgtttctccattctgtataacattttccattctctgggcagtttatcgcaacgaatcctttgcctggattggtcaagatatacttggaataacactgataatcacagttctacagattgtacatgtaccaaatctcaaggttggtacagtacttcttggctgtgccttcatttacgacatcttttgggtatttgtctcaaagaagtttttcaaggaaagcgtcatgattgtcgtggcccgaggcgatcgaagtgga

SEQ ID NO: 6655 - DNA, 258 bp, Glycine max
  Clone ID: 701098787H2
aaaaccttgatcaagaattgcagcattaatcttcaaccatggccacacccttggcctaccaagagcaccttccggcggcacccagttggctgaacaaaggtgacaacgcatggcagttaacagcagccaccctcgttggtcttcaaagcatgccgggtctcgtgatcctctacgcaagcatagtgccgaagaaatgggcagtgaattcagctttcatggctctctatgcctttgcagcagttctaatatggtgggtgc

SEQ ID NO: 6656 - DNA, 261 bp, Glycine max
  Clone ID: 701098788H2
gctcccctcacctctctctccgaaatccccaaattgcctgtgaatgctagacaccctaggcacgttcgatttgatgctctcccatttgcaatcaagggcgagcgcattcggttcttgcacgcacaggctggtactaccgctgcatcggcctcgatccctgaattcatcattctttctcgcaccatctttttctattccgattcgatttgttgttgttgttgttgttgttgtgtttttgtttccttccttgacgaatcatca

SEQ ID NO: 6657 - DNA, 259 bp, Glycine max
  Clone ID: 701098790H2
gtcgaaccagacacacttccacgtcaccaccaccgtcgaaggtggcgcgtgaggctgtttccggcgacctataccggcggcgctgagtggtgatcaaggaaatgggtcagaggctcagctgcgtgcaacagcagcacgaggagcatggtgtgctcttcccagcacttgcacgtggagaattggaggttgttgaggccatggtggaggaagaccccactgtgttggaacacaccactggctgtgaccgcctttctcctct

SEQ ID NO: 6658 - DNA, 255 bp, Glycine max
  unsure at all n locations
  Clone ID: 701098792H2
acaatatcctccgccaccatgttgcatatggaaaaccccctcctgcagtcaacaaactcaattaccttcacattctttgggctgttgttatttctctttgttcttacatccatattcagaaaccgtggtcgtgcaacaagataagctatcaccagatgctagaggcgcgtggcctttaattggtcacatccacctcttaggtggctcaaaaccatcccatgtcacgtntggccacatggcggacaaatatggtcc

SEQ ID NO: 6659 - DNA, 256 bp, Glycine max
  Clone ID: 701098794H2
caagcattctccattacatggcatggagaaacattgcaatgtagaaatcgctgcacatgtttcacgcctgtcatcatcaaaacatgaaggggagcaccattctttccagctagaagggttaatggagagtccgtccgtggatgacgatggggactgcttctcgcctttacagttaaacgcaacatccatcaacattgaagtctactataatacagcattgaactataccttgatggttacttttatctcatttttg

SEQ ID NO: 6660 - DNA, 264 bp, Glycine max
  Clone ID: 701098795H2
gcaaataaggacgagattgatgatgatcatgattacccttgtagaagtagtgccagtcatgatgggggcacaaagacagagttggatcatcatacacttgcatcagaagagaaattgggaattgaggaagaggcgggagatatgaacgctgatcttaacttcacagagcccaaattcagagacaggagctacaatgacagcagtaaccttaaagcttatagtggtgagacaactgaatctatgaaggcaacaagtgagacttct

SEQ ID NO: 6661 - DNA, 276 bp, Glycine max
  Clone ID: 701098801H1
ctcaggaaagatacaccatgctgtaattggccctttggaagacaataccgtgtacttctaccgatgtggtggaaaaggtcccgagttcgagctcaaaactcctccagctcaatttccaattacttttgctgtggctggggactgggtcaaactggttggactaaatcaacactggcacatatagaccaatgtaaatatgatgtctacctgctaccaggagacctttcatatgctgattgtatgcagcatctgtgggacaattttgggaaacttgtg

SEQ ID NO: 6662 - DNA, 264 bp, Glycine max
  Clone ID: 701098802H1
accattttgagattcatattcatcagtctgtgtacaaaatggcagggtacgcagactgctatggtctatgtgcttctttttggtttctaattgcacagattttatagcattatactggctaataagtcaaggttttgataagcttcaaattcagcgtgaagcaagtaacaggaaaatcatgtcattagttaggtctgctgatctagctccaacatcatatgaaaatgctaagctcttctcactgaaggagcataatgttcgacc

SEQ ID NO: 6663 - DNA, 268 bp, Glycine max
  Clone ID: 701098803H1
actcaaatgaaaaaaactcatgatgacgaattagttgcagatgtccatgccctttcggcaggtctaaaggcttatgtaacatcatacactgcaaagtcactcagcatctgtagggacgcctgtggaggccatggttatgtgctgttaatcggtttggtattttgagaaacgatcatgacatttttcaaacatttgaaggagacaacacagttctgcttcaacaggttgcaggtgatcttttgaaacaatacacgggaaagttcaaagg

SEQ ID NO: 6664 - DNA, 267 bp, Glycine max
  Clone ID: 701098804H1
aatccctctttcttcctcttcctcagtagtgcgattttcgattctcttctctgcaactatgcctaaccctaaggtcttcttcgacatgaccatcggcggtcaacctgccggccgcatcgtgatggcgctctacgccgacggactccgagcaccgccgagaacttccgcgcgctctgcaccggcgagaagggcgccgggcggagcggcaagcccctccactacaaaggctcgtccttccaccgcgtgatcccgaacttcatgtgccag

SEQ ID NO: 6665 - DNA, 268 bp, Glycine max
  Clone ID: 701098806H1
ctataaccaaacactcttcttcatattcttcttcttcttcttgttcttgttctatctgtgacgagcatcatggcctcgagagcagtgctattgttggctatgtgtgtgcttccggccatggttgtcgccattcgcccagcaagaaccctttttgcgtgaagggtcgcgtctactgtgacccttgccgtgctggttttgagacctcagcaaccacctacattgccggtgctgagattatgttgcaatgcaagagcagggttagcaacga

SEQ ID NO: 6666 - DNA, 270 bp, Glycine max
  Clone ID: 701098807H1
cgacgagagtgttttaaaatatattgaacagtcacttgggaacattcactatggaagaaccaacctctctaacggtctcactgcgttggaattaacaggaactgaccgagttggtcttttatcggaagtgtttgctgtactgctgatcttcaatgtgatgtggttgagtctaaggtttggacacacaatggccgtattgcctccttactctatgtaaaacattctagttctgggtctgctattgaggactctcagaaaattaataagatt

SEQ ID NO: 6667 - DNA, 274 bp, Glycine max
  Clone ID: 701098808H1
attcattcaagattcagcaagtgcgttttggaagcagagaccgaaatacttcgagatggcccgtacaaagcaaactgctcgtaagtcaactggaggaaaagctcccaggaagcagcttgcaaccaaggctgcacgtaagtctcaccaacaactggtggtgtgaagaagcctcatcgttatcgccctggaactgttgctcttcgtgagattaggaaataccagaagagcactgagctcctaatcaggaagcttagccgccagaggttggttcgtt

SEQ ID NO: 6668 - DNA, 274 bp, Glycine max
  Clone ID: 701098809H1
ccgacttgatttgatttattcacataaccaatttatcatctctccgatctttcaatggattctgacttctggacctcgcgtcttgctgccgctaaacgccaatacacgcttcagcatcaccatccaaattctcacttagatcgttgggaatcgatgattttgatgtggaagaagaggtgagacctgattttccttgcccgtattgttatgaagactttgacatcgcgtctttgtcttctcatcttgaagatgaacattcttgtgaatcaagagt

SEQ ID NO: 6669 - DNA, 275 bp, Glycine max
  Clone ID: 701098810H1
tcctgtagatcacaacaatatgtttctggatatgggttctttgcaagccgcactgccagacgccctgtttccagccaccttccatggtggtatagctgaatcttggcttcctcaaaacccggtgacctcatgtatatcctacgtggagaaggtggtttgtcattcatggctatgcaatcaccaagttcacaaatacagaacatccagaaaccggaaccagttgcttcgatagggggaaatccttttgcataggattatgctgtagaatgtactat

SEQ ID NO: 6670 - DNA, 274 bp, Glycine max
  Clone ID: 701098811H1
cacaattcacaaccgaaacagtttccatccctctcacaaaatgacaacaatatcaaatcgctcccttctcttcctcttcctcttcctctccaccctccacatagcttccaccctctcaacccccaccaacttcatcaagtcctctgcagcaccacccagtacccagccctctgcatccagtccctctccgtctacgcctccaccatccagcaagacccccacgagctcgtccagacagccctctccctctccctcaaccacaccgaggccacca

SEQ ID NO: 6671 - DNA, 271 bp, Glycine max
  Clone ID: 701098812H1
ccagaccaagtcaagatcgttgcagcaataaaagaagctggaaacgtcaagagatttttcccatctgaatttgggctggatgtggaccgtcacgatgcggctgagcctgtaagacaagttctcgaggaaaaagcgaaaattgaagagtaattgaagctgaaggaattccttacacttacctatgttgtcatgcctttactggttatttcttacgtaacctggcacagattgacatcactgttcctcctagggacaaggtgttcatacaagg

SEQ ID NO: 6672 - DNA, 271 bp, Glycine max
  Clone ID: 701098813H1
ccttctctaagaactcttccaattttttctctctcttcctcttcacgcttcatcgccatggcatcaccagcaagaaccttctttgccttcattctcgccgtcgtcgctctcttcttcgccgccgccaatgctcaagacctctcccggctccgagtcccgatgccggagcggcgggatccgtttcgagctccgtcgccatgatcggagcttcggttgtgctgtcattgatggctatcttgaagcattgaattcgttaatttcgttgggtttg

SEQ ID NO: 6673 - DNA, 265 bp, Glycine max
  Clone ID: 701098814H1
tagaaaagcatttcactgagcaaaatactgcaggtaactctgatgtccataatggaaacgatgttgaacatcaccaggatcattatgcttccccagactctcattcatcaagttttccctcctttgagacacttaaggaggttttgcttcttccctacccaatgatcatcgtgtattggatgacaagtcctcgagtcaccagcctaagagattaccttcaatggacgacgactcgtatttctcataccccaacttatttacctct

SEQ ID NO: 6674 - DNA, 265 bp, Glycine max
  Clone ID: 701098815H1
cggctcgagatttccatgaactttgactattatatcagtgcgagtactgactttgtgttattagatgagacaactttaatcaatatcattaagcatccagatctgacagtaacgtctgaagagaaagtccttaatgcaatctaatgtttggcatgaatgcaaaacagttgtttgggtgggaagtggtggatcagttaatggaaaattcaaaaccagaactcctttttggtgagaggcttcagttaatctatgacttgttgccatt

SEQ ID NO: 6675 - DNA, 78 bp, Glycine max
  Clone ID: 701098817H1
cctttgctgtggcttttgaaggggcatcctggaaggatccggattcaattcctctcatggtcatgcaagccatgatgg

SEQ ID NO: 6676 - DNA, 272 bp, Glycine max
  Clone ID: 701098821H1
ggaacttgatgacaatgtcaaggcaaaacttgctcaattctgtcatgtgccgttgtcaaacatacttactctccatgacgttccaaatatttggcacattcctttgctattgaaagaccagaaggcacatgaggcgatccgaaagcattaaacttgctaggtgttgctgcagagcctaatttgaaggagtggacttcaaggacaaaagtctatgacagatgtcatgaaattgttagaattgcaatggtgggaaaatacactggcctttcaga

SEQ ID NO: 6677 - DNA, 272 bp, Glycine max
  Clone ID: 701098823H1
tacttttgttattattggtggccatttcttccgtgccctcttcttcctgtgccagccaggtcaagtacgcgacactcgtcgcaaaattaataaaacctgagaaatcgagaagggcccgtgtaaggctgcacacgtttttttaatatgggatgaaaactgagaagaggttgttacagtggattgaggttagaggagaaagtctctccatattgatttgaattgttatggatattcagagttgtgacataaaaatggctgcgaaagagtaggtt

SEQ ID NO: 6678 - DNA, 131 bp, Glycine max
  Clone ID: 701098824H1
ctgccgggcaaatctttcaccagtgttcaggatgaaaccaatccaatttgagaaggatgatgacacaaactaccatatggatgtgattgctgggcttgccaacatgagggcacggaattacagcattcctg

SEQ ID NO: 6679 - DNA, 209 bp, Glycine max
  Clone ID: 701098825H1
ccacagtcagacacaataaaaatcaaagagcataatgtcaggcatcattcacaagattggcgagacccttcatgtgggagggcacaagaatcaggaggagcataagggtgagcaccatgctggagaatacaaaggggagcacatggtgaacacagtagtgagtacaaaggagagcatcatggtgaacacaaagctggagacccccatgg

SEQ ID NO: 6680 - DNA, 271 bp, Glycine max
  Clone ID: 701098826H1
cctgaaccattcctccaaggtccacgggttgaaaactatgctaggcatcgttgtgcaatgcgcaatcttcttcaagttccagtaataagagaagacaatgccaaggatagaaggaaattcagaaaaagagaggctgataaagtgcaatcacaagtgacatgctagtggagattttggaagaatccatcagaacaatttggcgtttcataagagcttgataagatgcatccagcttggcacttaaagggtcaagagaaaaccaagtagagct

SEQ ID NO: 6681 - DNA, 256 bp, Glycine max
  Clone ID: 701098828H1
gtcttttatcagaaacttgtatgaattctctcattatgttgcagtgagaacatcatatggaaagcatttagccccaccaccattaacagtggacgtggagctgaatttgagggtgctgtcattgctctattccatttgttataactagaacagacaaggttcgtgcccttcgtgaagcattttaccggcaagaccttcccaatgtgacaaatctcgttgctaacgttttgatcttcctaattgtgatatacgtcca

SEQ ID NO: 6682 - DNA, 270 bp, Glycine max
  Clone ID: 701098831H1
ccatgagacatcagtgcctccttctggtctccctggtgttggtctcctacgctgcccggtcggaatcagcgctgggcggctggagccccatcaaggacgtaaacgacagccacgtggcggagatcgccaactacgcgctgacgagtacgacaagcgttctggggcaagctcacccttgtcaccgtcgtcaagggcgagactcaggtcgtttcgggcacaactaccgtctcgtgctcaaagccaaggatggatccgccacggccagttacg

SEQ ID NO: 6683 - DNA, 274 bp, Glycine max
  Clone ID: 701098833H1
ccatatttcttctcatcgagaagcttcgcgaacgaaaacaaagaaccctagacagatccattccatagccatgtcaggcgttggccctctccctcaggattgggaacccgtcgtcctccgcaagacggctcccaccgccgcgccaagaaggacgagaaagccgtcaacgccgcccggcgctccggcgcggaaattgaaaccctaaaaaagtataatgctgggacaaataaagcagcatctagcagcacttcattgaacactaagaggctggatg

SEQ ID NO: 6684 - DNA, 271 bp, Glycine max
  Clone ID: 701098837H1
gcaaaaccaagtaatactagccaaaatatgtctcccaaatacatgtcccttttcctcctagtaatactagggatggcttttctggccactacttcccttgctgatcgtcgttttctttcggtggaagatggtcatgataccatcaccaccacccaccaaaaaaacactggcctccaaccacacaaaatgaaccttcaaacgtagaaaacaaggagaacactgaggtggaggatggtcatgatcatcaccatcactacccacctaaaaaaca

SEQ ID NO: 6685 - DNA, 271 bp, Glycine max
  unsure at all n locations
  Clone ID: 701098839H1
acncaaaaccctagcggcgcctgctttcttcgttcgtcttttgcatcagccatcaggatggagtctcaggtgaagcatgctcttgttgtcaaagttatgggtcgtactggatccagaggacaggtgactcaggttagaggaagtttttggatgatcagaaccgtcatatcatgaggcatgttaaaggaccagtgagagaaggagacattctcaccctactcgagtctgaaagggaagcaagaaggttgcgctagagggtatttttttcttg

SEQ ID NO: 6686 - DNA, 224 bp, Glycine max
  Clone ID: 701098840H1
cctgtattcttgatattgacgttcaaggtgcaagatctgtgagggccagttctcttgaagccatattcatctttatctgtactccatcaatggaggagctggagaagcgccttcgtgaccgagggacagagaccgaggacagatccttaagcgactacgtaatgctgaggctgagattgagcaagggaaatcttctcaagtatttgatttcatcctatacaatg

SEQ ID NO: 6687 - DNA, 271 bp, Glycine max
  Clone ID: 701098841H1
cggctcgagctagccaccctttaatcttcgtcaacgttacttttccacctcgtacgagggattcacttgagagggaaagggactgatggtagacaacacacagtcttactgggaaggctacaaagcgttttggtcagagagttttcctttttgagcaactattcgaggttcatcaaccgtcataaacccatcccttcctggtcaagctctgatgtcgaggagttcattgcttctgatcctgttcatggacccgtcctgaaaagtgctagag

SEQ ID NO: 6688 - DNA, 271 bp, Glycine max
  Clone ID: 701098842H1
cggctcgaggtgatgtgatgctcctcctatcataattttcactcctgtcaattcagcatttttagtaacatttcagcaagaatgagctataacatgtaaaactgatgtgagctttaagccttatacttgatgtcacaaggttgacatggatgcagcagttaagcttttagtctagttgaaagatgattttgttggcctgacatgctgccaggaggctgaaatgtaaatttgcttggtattgggtattaatgatttgtggtttgccacttta

SEQ ID NO: 6689 - DNA, 225 bp, Glycine max
  Clone ID: 701098844H1
ccaagaggaaggcgaagaccgcaaagaaagaatagttttcagaagcagaaagaggttttccgtcgtttcgcgtttagcgttttgcgttttgagttccgaaacgatgtcctccatggccatcaccaccagggacagagatcagagcttctcatccccgtcgccgacatccccgccggagatgccgccgtttccccttcccccaagccatcgtcgtcggcgtcgccc

SEQ ID NO: 6690 - DNA, 115 bp, Glycine max
  Clone ID: 701098847H1
ctcttttcttcccattttgccccttcctcctttccttgtttccgaggagggccaaccacatatgctaaacaaggaaactaaattctaacctccttcagatctacaccacccttct

SEQ ID NO: 6691 - DNA, 172 bp, Glycine max
  unsure at all n locations
  Clone ID: 701098848H1
ccgcgagccagggtttgtgaagatgacgacgattcgcatgttttgctgcaacgatcttcttcgctttgccggcggtaatctcngacatctcaccgaaacattcaacatgtcttctacatgacctatcttgcaagatggactgactatttcacgttggcgaaggcctggaaat

SEQ ID NO: 6692 - DNA, 270 bp, Glycine max
  Clone ID: 701098849H1
attcaaaattacactctcattaactaattttagaacatgtatgcaagttcgttttcagctctttctgtgttgtatgctatggcatcttaattggttcgattgaataatctgttaggtctaccctagcaaaacaaacctatactttcttatttccttggtgctttttgtagctttcagataggtttctgtgtgttaatcgaatagacctgaattatttattgtatcacaggttgtgatggcagcagcaccagcagctaccttcgctattgg

SEQ ID NO: 6693 - DNA, 264 bp, Glycine max
  Clone ID: 701098851H1
attttgacagtgcaaccatgaccaacttcaaacttgttttttgctgcagtgtcaaaagttcaggtggagttgacacatgcggccttcagccaggatcctttccttagcagtttgtttttgcctttgcacaagaacttgaccaatattggagagaaagctgcctcatcttggcaattgctgtagctatggacccaaggcataaaatgaaacttgtcgaattcacctttgctaagatatttggtgagaatgctgaggaatggataa

SEQ ID NO: 6694 - DNA, 264 bp, Glycine max
  Clone ID: 701098852H1
ccgctcgagcggctcgagctaatctccatctaatagtgttaatttgtctttctctatctctaacggtcatgcgtgcttttgcttttgatgaggaaaactcctccaccgtggctccggcaacactctacaaagctctacaaaagatgctgacactatcatcccaaagattattggggccatccaaactattgaaatcgttgaaggaaatggaggacccggaaccgtcaagaagataacagctagtgaaggtgaccaaccagtttc

SEQ ID NO: 6695 - DNA, 268 bp, Glycine max
  Clone ID: 701098853H1
gtggagaccgagaaagatgatgaggttaaggtggagtttagtcgtaacggtcacgttcgctgttttgctgttctggattggatcgctgcaagttcaagcctctaattctgtttccgccttcgttcaaaacgccatctatccaacagaatcgccgttttctccaaatcctattgcccctactgtttgcgcgccaaacgcttgcttgctgagctcaatgagaaaccgtttgtggtggagctcgatttgcgagatgatgggtatcaaattc

SEQ ID NO: 6696 - DNA, 106 bp, Glycine max
  Clone ID: 701098855H1
gccatcgtcgtcgtcgtcgtcgcgaagaaaatcgagcacgaaggtgaaagcttcaaccggtgcgaacacgaacctgagcatgctcaacgaggccttccacacaaca

SEQ ID NO: 6697 - DNA, 133 bp, Glycine max
  Clone ID: 701098856H1
ctcgagccgctttaaggaggaagacaaacccaacttcattggttctttctattccaaaactcaaggctatggtcgaagagctcttgaaagaatatgacaatgtgtgcaccctcagggttcgcatgccaatttc

SEQ ID NO: 6698 - DNA, 167 bp, Glycine max
  Clone ID: 701098863H1
gaaacatttcactaatagagagacataagcataatattgagaaataatggaggggtgtacttattgtgtgaagtcgctatgccttgttgggtttgtggtgcttgtgagtactattgcagggggtggagagtgctggtgaatggggaaatctaccacccagataatga

SEQ ID NO: 6699 - DNA, 261 bp, Glycine max
  Clone ID: 701098867H1
gaaaaagctagaaaagttccctctgcttcatcttcttcgtcttcacccttggccgaggaaaagaaacaagaagatcaggttcagctaagactcaacagagtgccagaatcttatgctgctcatatgagacttagactggaagcttcaaggctagaagcttttctcttgcagatctgcaagagcatgatgatgaggaagaagatgatgattgattaaattaacatttaacataggttttttttttttggtttaattcttttg

SEQ ID NO: 6700 - DNA, 271 bp, Glycine max
  Clone ID: 701098872H1
ccctcgagccgaatcggctcgagctaaaacccagaaccagatctaggcgtttattttccttttgttttagaatttgaacaagtcttgcgtcttcaaaggaaataggatgggagaattgaaggacactgaggcttacgaggagagctcatcgactacgaagaagaagaagaaaaagctcccgattccgctaaacccgttactcaatctggcaagaagggttatgttggcatccatagttcgggatttcgagacttcctgttgaaaccagagc

SEQ ID NO: 6701 - DNA, 65 bp, Glycine max
  unsure at all n locations
  Clone ID: 701098873H1
ctcgttntgaatatgcagatcttcgtcaaaaccctaacgggtaaaacgattacgctagaggtcga

SEQ ID NO: 6702 - DNA, 91 bp, Glycine max
  Clone ID: 701098876H1
ctcaactttgaaattcttaaaaccctaactggtccgaaccattggagccagcgtgcaatagttcctcctctcactcgctccctccacacaa

SEQ ID NO: 6703 - DNA, 265 bp, Glycine max
  Clone ID: 701098877H1
gcctttggcactggacttcctattaagtctgatgtggctggagacgtgttgaaactacttgttgaggatggagagcctgttggttatggagaccctcttattgctgtgttgccatcttttcatgacatcaagtgaacagccttttcctgttaatgattaatcatgcggcatttttcttattaggggagctattcgcgtattcgcaaaactttttaataggttacaaataaatgtgactaaatatttggtacggaggttccttatt

SEQ ID NO: 6704 - DNA, 269 bp, Glycine max
  Clone ID: 701098879H1
cttggcatcttgtgttgtgtccctcttttaagctatttccttcccttaacacaattcgttgtgccaattgccatagtcaccaaccaattaacaaaggtatatatatcatcatatcatcaccacatgacaaatattggttgtcttttcttgtggtggtggctacttttgtcgtggcagccacagctggtagcttttaccaagactttgaaataacgtggggtggtgagcgtgccaaaatctatgagaatggaaaccttctcacactctcc

SEQ ID NO: 6705 - DNA, 264 bp, Glycine max
  Clone ID: 701098881H1
cacaaacagaggtgttgagtgagttcaaatcaattttaggcagaaaaatgaggtgttttggtcttgtagtgataggtctagtggttgtgcttggagggttacccttctcttcaaatgcaggattagatcccttttttacaagaagagttgtccccaggtgcatttcattgtatttagagtcgtagagaaagtttcaagaaccgatacacgtatgcctgccagcctcgtcaggcttttctttcctgactgctttgttcaaggctg

SEQ ID NO: 6706 - DNA, 265 bp, Glycine max
  unsure at all n locations
  Clone ID: 701098883H1
ccacgcgaagaggcgcaggtnagcagtaactcgtggaattgctagcaatggcgaggatcaaggtttacgagctgaggcagaagacgaaggctgatctgttgaatcagctgaaggacctcaaggccgagcttgcttgcttcgtgttgctaaggtcaccggcggtgcacctaacaagctctctaagatcaaggtggtgaggttgaacattgcccaggttttgacggtgatttctcagaagcagaaggccgcgttgagggatgcctac

SEQ ID NO: 6707 - DNA, 183 bp, Glycine max
  Clone ID: 701098884H1
ctagatgctgaaaatcataacagtcagcttcaattttcacttcagctttggtacttaaaatgttagtttttgcataggtaatagtaattgaagcagcaattgtaacaaaatagcaagaaactttccaatttcaacgtgtctaatgaaattcacaatagaatatattatgttctactttgcatt

SEQ ID NO: 6708 - DNA, 267 bp, Glycine max
  Clone ID: 701098885H1
ccatgctgaaagacaggctcttaagaaggaattgaaaaaatataaagacccgaagcgtgtaaatgaaatagaagaacgtatatcatggattgataaacaagtgaagtctgattcagcgaagatattgatgcagaatattggctaagcacaaaaagaaagagagagaagcagcaaagcagggaaaacgtcctttttatctcaagaaatctgaaatacggaagcaaaggcttattgaaaaatataaccatctcaagtcatctggcaaac

SEQ ID NO: 6709 - DNA, 108 bp, Glycine max
  Clone ID: 701098887H1
gacatgacttccttaagctccttagtgctgctccttgcagctctaattctattccctcaagttgttgctggctatgagaagcccccggtgtacaagcctcccattgag

SEQ ID NO: 6710 - DNA, 185 bp, Glycine max
  Clone ID: 701098888H1
agacactagacatatattatttggacgggctgaaaaggtcacgaaagtaaatctcagcacatagtttgtgtggtgtctccctcagtattactggatatcttttaatgttatttctggattttctcttctacaaaatttctatcacaacaaaatgtcagttatgttttaaaataccataagaaaac

SEQ ID NO: 6711 - DNA, 225 bp, Glycine max
  Clone ID: 701098889H1
gcgaaatgagcattgggcattggctcagtccttctgaggcaggtggcgctgccaaacgcagaacctccggcagaaattgccaccgcaaacacgtggaagacgggtagtagtactccatctcccattctctcatattcctttactaattaaagatcatgaacagcgagagacagtcgacgacgacgacgttgctgcacggcaagtacgagctaggtcgtgtgctgg

SEQ ID NO: 6712 - DNA, 268 bp, Glycine max
  Clone ID: 701098890H1
ccaatatattccattctctctgtgtatttccctacctctcccttcaagatgcagatcttcgtcaagaccctcaccggcaagaccatcacccttgaggtggacagctctgacaccatcgacaacgtcaaggccaagatcaggacaaggaaggaatccccccggaccagcaacgtctcattttcgccggaaagcaacttgaggacggccgtacccttgctgactacaacattcagaaggagagtactcttcacctcgtcctccgtctccg

SEQ ID NO: 6713 - DNA, 136 bp, Glycine max
  unsure at all n locations
  Clone ID: 701098891H1
gtgagcagcaccgattaacactatgttgcgaagcgngtgattacaccaccgtatgtgattgtcttctcatcattcagacatcagaaacatgttattccattttataagttcccttacaatgatattatcgcactat

SEQ ID NO: 6714 - DNA, 264 bp, Glycine max
  Clone ID: 701098893H1
cgggaacttaacaaaggaagaaacgcgaattgatgatggaggtcaccaaagacgaagctgcaaccccaggagcaggaggtgctcaacctcgcaatccaaatccaaatccaaatccaactccaaatccaaaccctaccctaaccctcctcacaccaccagaggatctaaaggaaaatcgtgtaagggatgcacctactactcatcgcttcataaagccaagtccaaaaaccccacatgcgttggtttctccagaacactccagca

SEQ ID NO: 6715 - DNA, 162 bp, Glycine max
  Clone ID: 701098895H1
ctaatactaagcgaaaggcggactggttaactgaaaaaatgcgtaacaacaatttcactgtctcatcaatgcacggtgacatgcctcagcacaacagacatgctattatgggagacttcgtgctggaaaaaccgtgtgcaatacaaatgacgtttggcccgt

SEQ ID NO: 6716 - DNA, 287 bp, Glycine max
  Clone ID: 701098901H1
ctcatttctcacctaactttctattcttctcagtctcagatcagaaccttagccatggcagcgttccagaagatcaaggtcgccaaccccatcgtcgagatggacggagatgaaatgactagggttatctggaagtcaatcaaggacaagctcattttgcccttcttggagttggacatcaagtattatgacttaggccttccttaccgtgatgagaccgatgataaagttacaattgaaagtgcggaagcaactctcaagtataatgtggcaattaagtgcgcaac

SEQ ID NO: 6717 - DNA, 281 bp, Glycine max
  Clone ID: 701098902H1
gtctacaaggaagttattgctgaccttaaggcagctggtgcttcatggattcaatttgatgagcctacccttgtcttggaccttgaatctcacaagttgcaagctttcactgacgcatatgcagaacttgcacctgctttgtctgatctgaatgttcttgttgagactcactttgctgacatccctgctgaggcgtacaagaccctcacatctctgaatggcgtcactgcatatgggtttgatttggtccgtggaacccatactcttgatttgatcaaggg

SEQ ID NO: 6718 - DNA, 278 bp, Glycine max
  Clone ID: 701098903H1
caaacatctcaatgggttcttcttctattacaacatcgccctccaatcatgaccatggctgcgatcgtgctcctgttcacggtctttgccgtttcctccgccctagacatgtcgataatctcgtacgacagcgcccacgcggacaaggccgccacgctgcgcaccgaggaggagctgatgtccatgtacgagcagtggctcgtgatacacgggaaggtgtacaacgcgctcggcgagaaggagaagcgcttccagatcttcaacgacaactgcgattc

SEQ ID NO: 6719 - DNA, 258 bp, Glycine max
  Clone ID: 701098904H1
gtccttcttacttagtagacattctcaagccatgacttgtaaacttgtgatctacttcactttcttcttctgcttcctttttaccttggttccttatgttcatatgtatccctcgtacccctatagtggaaattaccagcttgacctcaatttctatgatagatcatgcccaaatttgcaaaggattgttggatatggtggttggttagcctcaaaaaatgacaacagattggccgcgtccctcttcggttgcacttc

SEQ ID NO: 6720 - DNA, 279 bp, Glycine max
  Clone ID: 701098905H1
gaaactcctaattgtcaattgttgtaaagaaaagaactgaaaacactgacactgttattctctgaattttctcaccatctacaactgaagttttaaccaatatggaaactgaaaagtctaatgtttcaaaggctgaagaatttaaactccttgctaatgaagtgttcaatgctcgaaaatactcccaagccattgatctatatacacaagcaattgagctgaacagtcaaaatgcagtttacttttctaatcgtgcctttgcccatcttcggcttgagg

SEQ ID NO: 6721 - DNA, 276 bp, Glycine max
  Clone ID: 701098906H1
gtcgaattggcatcatctgacatcagagaacttggctcaagtgaatattatccatacttcattaaacgccttgtgtccatggcaatggacaggcacgataaggagaaagaaatggcttctgttctgctttcagcactgtatgctgatgtcatcagccctgcacagattagggatgggttttttatgcttattgaatcttctgatgatcttgctgtggatatactggatgcagttgacatccttgcattattcttagcacgagctgttgttgatgac

SEQ ID NO: 6722 - DNA, 273 bp, Glycine max
  Clone ID: 701098907H1
cttggattttgcattgcgcagatgtgaaactattccaaagtcagttttcagagaattgttgtatgcctaagtttatgcgaaatttgacatctctcgaccctatgattcttttcatgttctggtctgaatacacaaatactgagatgtctatgactaggttatagagtatagacccatgtgatgcacgtgttagacattcaattttatggatgaataattaatatagaacaattaaagtaaaaaaacaaccacccaagatgaaaaccacaacca

SEQ ID NO: 6723 - DNA, 259 bp, Glycine max
  Clone ID: 701098908H1
ctctaaaggagtatgaccaagttggtgctgaccttgggatcattcccaaatcttgtaaattctttgctgatgatccgagctggctgacgagatggttaactggggacgaaaaagtaccaaggatatgatgggacattattttgacatgtgtaatttgaacacttatttctgtactattttaactcgcagctccttatacgaaagtcattgttctaagttttctaatcaattgcctggccttagaaatttgctttttttt

SEQ ID NO: 6724 - DNA, 274 bp, Glycine max
  Clone ID: 701098910H1
tggcctcacaaaaacaaaggtaccaaaggaaacttgcaataattctaaatattaaggtagtattacaatacatgttggaatctgttcttgcacgggtgaatttgaagaagaagctgagagctgttagatatggttgtaattggaagaatatcttatttctttagcttctttttctgtctctcttttttggtagtaaaacataattgggtagtgtttgactcttggattttagagcctatttgattcaagaagactggtggcaagaaaggttacc

SEQ ID NO: 6725 - DNA, 275 bp, Glycine max
  Clone ID: 701098911H1
ctgagtttggaaatgatgtggaccggactcatgcagttgaaccagccaagtctgcatttgcaacaaaggccaaagttcgccgagctattgaggctgaaggaattcccttcacttatgtgtcaagcaacttctttgctggttacttcctgcccaacttgtcacagcctggagccacagctgcccccagagacagagttattatcctaggagatggaaaccccaaagctgtttttaacaaggaagaggatattggaacttatacaatcaattctgtg

SEQ ID NO: 6726 - DNA, 293 bp, Glycine max
  Clone ID: 701098912H1
aagacttcatgtgccatgacggtgacttcaccgccggaaacgcaccggaggcgagtcgatctacggcgccaagttcgccgacgagaacttcgtgaagaagcacactcggtacccggcatcctctcccatgcgacgaacgcagcgttcccaggacaccataccggatcatcagttacttccatctagcacgtacgcaccacggactagctcgacggaaagcacgtcgtgttcggacatgtcgtccgatgggatggacgtcgtcaaggagatagagaaggtcggatccactgcgg

SEQ ID NO: 6727 - DNA, 275 bp, Glycine max
  Clone ID: 701098913H1
cttaaatttctgaacattgaacaactcttcacacaacaacacttcaatctggcattgtagcatcatgactggcagagaaatcctccatatgatgaaggtgaaagcagggtttggaacaccagacacagggaatggaaaaggcaaaatatcaaaacacattacacatggctttcacttgatgaagggcaaatcagcgcatcctatggaagattatttagtttcagaatttaagcaagaaaaggacagagaattaggcttgtttgcaatatttgatg

SEQ ID NO: 6728 - DNA, 259 bp, Glycine max
  Clone ID: 701098915H1
gtttcagctatttttctaaagctgtaaaattttatttttgattttctgagatcttagagatgttttttgagggaaaagtcaaaccataaagctatggattttattttcttgttagctcaatcaggtgccatgtttctccgaaggtgtcccattaggggtccaatgtttttgtatttcattagtctcaatttacttatttttgttgacatagtaattgtttaacttgtcagttcataaataacattatcgttatatgctc

SEQ ID NO: 6729 - DNA, 280 bp, Glycine max
  Clone ID: 701098916H1
cggatatagcttcttcgaggctgttcgggtggcggagactccgctccggaatataccattccacgcctcctccatctccctcaccttcttcttcgtcgtagcgttcaaaacgacgtgatctctctctcgctttctctgattcggttcttctcgtcgttttatggatccggcttctagaactttcctttctcattgtttctcttctctctcgtcgagccagaaatttcttagatgatttggtgctattcgtctttttcttgttcgcttcaattcttcaggt

SEQ ID NO: 6730 - DNA, 278 bp, Glycine max
  Clone ID: 701098917H1
caaatttcatttcgtcaatcactcctaacttctgcattccaaaaatgaactcggacacgacgtcgtattggtgctacagttgcacgcgcttcgttcacatccacgagcagaacgacgtcgtgtgcccccgctgccatggcggcttcgtcgaaaaggtcaccgccgggcaatcggcaaggcaggggttccgccgacgccgccgcaacgccgggaggcactcgccgttcacaccggtgatcgtgctccgtgcgacggggggaggacgaagagagcagctt

SEQ ID NO: 6731 - DNA, 280 bp, Glycine max
  Clone ID: 701098918H1
acagatgtttcttcgtgacttggggccaattattcatgaaacagattcacatgcatatacaaatgcccttgtcagcagcaatattgaatgtcaaagttaccaattgctgccaaatccagaggatgccaatcaaactgttggtgaattctggatgcatggtgaaagtaatcagctatcatccccaggtgttgtatatgaatctgttggctttcctacggaaggcaataacaatcaaagtagcactgtggaagatgttgctacaagtagcttgtcctctgct

SEQ ID NO: 6732 - DNA, 264 bp, Glycine max
  Clone ID: 701098919H1
tcgagctctgctttctgtgttattgtctggcttttggagccgatccaaccaatcatcgctgactgccaatacaaaatctcatcccttcccctttctcttactgactctctttgtcaccgggtttgtgagatgtcggatgcaccggcgagtccgagtcacgagagtggtggcgagcagagccctcgcggctcgttgtccggcgcggctagagagcaggaccggtaacttcccattgccaacatcagccgcatcatgaagaaggct

SEQ ID NO: 6733 - DNA, 264 bp, Glycine max
  Clone ID: 701098920H1
agaacccatgccagtctcagctagtccagcgccactgttaggggatcgactgtgtgaaaatggatttgagtgtgttaacattctccctgccaccaatgatgcacatggaggagtcattgtggacttaaaggagcctttgcactccgaagtttttgctactttgcttagatcttcacttttacattggaagcaacagggaacagatggtgtatggaccaagtttcctattgagcttgtcaatcctgttgaaactgcagttaagga

SEQ ID NO: 6734 - DNA, 272 bp, Glycine max
  Clone ID: 701098921H1
ctagctaacaccacttctctctctccctctagtttttctctcttcaaatgggaaactcattgaagactccatgctttcaactcaacaccaattcatcatcatcatcaaaatccgtgaagctcatattttgggaacgaacatcaagatccctaaagggaaaacacatagccggtgagatcatgtttgagtttcctgaaatgatggtgtgccatgcagactctttcttcattggacaaccaattcctgttctatcaattgatgataaactcatg

SEQ ID NO: 6735 - DNA, 275 bp, Glycine max
  Clone ID: 701098922H1
gcttcttcgagtttcacagccaagtcgtaaaagggtttcaagggatggaaaacatgcagagcttctggcaattgggtgatgaactccgtgggcactcaaaagcatcggaggatcacaagtggttaatggtcgcctcgaaactggccgaacagacaagattgaagggggagcgtgtgaacaaccttgatctttcaaagggacccattgaaacaaggtcaagggataaatttgggctccaggaagagaacaaatttgattctcttaacttgagcatg

SEQ ID NO: 6736 - DNA, 279 bp, Glycine max
  Clone ID: 701098923H1
ccctaactaacataacctctgtctccgaaaatgagtggtcacataacgaggaggaacagtgcccctcacaaacgccctccctcgttatccaagaagctccaaaacggaagccttagcgaacctcccagcaaggcttcttctccgccacctcaagagtttgatgggggagaaagaacagttaagcagcttcggttgtcgaaagccctcactatatctgaggtcacgacggtttctgaagcgtgccggagaatggccactcggcgtgtcgatgctgttttg

SEQ ID NO: 6737 - DNA, 232 bp, Glycine max
  Clone ID: 701098925H1
gcgcgggattcggctcgaggacaactgccaagcccacccatattcattctctcaaaacttccaaccatgagctgaagcaccacacatacccacttcctgcaaagacatcatttttattaccaatcttccgatttcagagataagtctctgtgggcatcgcttaattaaaggaatgtcaagtttccccaacacggtggcggattgccgcaggtccagcaaggcaccggaaaaa

SEQ ID NO: 6738 - DNA, 271 bp, Glycine max
  Clone ID: 701098926H1
ggccagtagaacccccttgtttattcggcatacacatcgtcgggggctagccatcgagtgcagtgcaaccatcggaaaataatggcagagacagattcgtcgtcctcttcagatggagaaccctcgcaatcgctggcgtcgattgcggagaatcttcagcgttctgccattcaatctgctcgaactgtgcaacatagctcttcaactcatttccgtgcctttcagaattttttaccagaagcagtatcacagtatagaacatatgaagatg

SEQ ID NO: 6739 - DNA, 200 bp, Glycine max
  Clone ID: 701098927H1
caaggatgccggcgttaaggggcagatagccattggattcacctccgagaccttcaagatgcgaagacaaccagggtgggacgccaatagctgcggctatcacggcgatgatggtctgctctaccgtggacatggcaaggggggagagccgtttggcccaacctatacctccggagacgttattagtgccggaattaact

SEQ ID NO: 6740 - DNA, 241 bp, Glycine max
  Clone ID: 701098928H1
ggtgttgtttggcttgcattcttccgtgtggagccctagacttgatccgcatagtgcacttgaacgggtacgtggaagaaatcacgcgtccaatcacggctggggaggttctgaaggcaaatccaaaccatgtcttgagcaaacctagctcccaaggcgtggttcgccggattctgatcctcgcaccggagaccgagctcaagagaggaggcatatacttcttgatcccggcggcatcgtt

SEQ ID NO: 6741 - DNA, 159 bp, Glycine max
  Clone ID: 701098931H1
taagttcgagtgtatttgcgtatgatcacaaagatggtgagaaccccatcttgtgacaaaagtggaatgaggaaaggaacttggactccggaggcagatatgaagttaattgcttatgtcactagatatggctggtggaattggcgcaactcgccccag

SEQ ID NO: 6742 - DNA, 236 bp, Glycine max
  Clone ID: 701098932H1
tcgataatctcggaaacactctctcttccttcaaggaatgctatctagcatagagaggagcttatgttatgtacccttggtctcttgttaagcgtgtaaaaaggtgctgggatagaataaaaacctggttgaccaataattctactgaagcggtggccactctttgtaaaggtgcaactgaagctgacattcaggagttggagaatgtattaaaggtgaaattgcctcttcctaca

SEQ ID NO: 6743 - DNA, 278 bp, Glycine max
  Clone ID: 701098934H1
aaagaacaagctcttacctatttgcctgcattgacaccattttgaagctttttgggctctcagaatcaacttttacaatcacaactaaggttactgaagaagatgcttctaaacgccatgagacagaaataatggagtttggaacctcctctccaatgctcactgtattagccactcttgcattgctcaatttattttgttttcttagtgtattgaaggatgcaatcctaggtgaaggtgacattggagcttatgagacaatggggttgcaagttcta

SEQ ID NO: 6744 - DNA, 220 bp, Glycine max
  Clone ID: 701098936H1
ggcgactaaaaaatggacttcaagcaatcaggttctggtggaaatagcctgcactaagtactctgaacaccagcatgctgcgaggaaggcttaccatgttctttataagaagtctctggaggaggatgttgctcatcacacaacaggagacttccgtaagctcatactacctctggttagttcttatcgatatgacggagatgaggtcaacttgaccctg

SEQ ID NO: 6745 - DNA, 273 bp, Glycine max
  Clone ID: 701098940H1
tgaagatcaagatttccactacaaagttacattatactaccaatttctcactcaaaacttagggaaaatgattgagctacttctgaatttgcagctgttagctcctttcttccttttcttcatctttccagtgtttttcttcttctttctcacgtcctcatgtcctactaaaagaagcatcactatcccaaaaccatacccactgattggtcactacttagacctcaaaggcatcggcaaccgccgtatccagtggctatccgacatcgtcaa

SEQ ID NO: 6746 - DNA, 271 bp, Glycine max
  Clone ID: 701098942H1
actttgtatagcaaaaatgataaaaaccaatagctcccaagattggcctgagccaataatccgtgttcagtccttatccgaaaggtgcacagattcaatccctgagaggtatatcaaacccctcagtgagcgtccatctgatgatgttgttgctgttgatgatgatgatgatgtcaacatcccaatcattgaccttgcagggctttatggtggtgaccctgaagctcgagcctccacacttaagcaaatctcagaggcttgtaatgagtgg

SEQ ID NO: 6747 - DNA, 257 bp, Glycine max
  Clone ID: 701098943H1
ggaacgctagggattcccatgttcctgtactggcgccacttcctattggatttgccgtgttcatggttcacttggctacaatcccaattactggtactggcattaacccagcaaggagtttcggagcagctgtaatctacaacgaagacaaaatctgggatgatcagtggatattctgggatggaccaattgttggagcagcagtgcatgcattttaccaccagtacatccttagagcagcagctatcaaggctctt

SEQ ID NO: 6748 - DNA, 207 bp, Glycine max
  Clone ID: 701098944H1
ctggcacgcaccaggtgttcttccagggtggagggagaccatggaaaagttccatagagagacattagaagtagggaaagcagttgcaaagataatagcccttgcacttgatttggatgctaatttttttgatcagccagaaatgcttggagagcccattgcaactctgcgtttgctgcactatgaaggtcaagtctcggatccctt

SEQ ID NO: 6749 - DNA, 275 bp, Glycine max
  Clone ID: 701098947H1
ggcagcgcagcgatagaagagaacgttcaagaaattcagcttcaggggcgtggatctggacgcgcttctggacatgtccaccgacgaactggtgaagatgttcagtgcgcgtgcacgtagaaggttccagagaggtctgacgaggaagcccatggccttgattaagaagctccgcaaagctaaaagggcagcaccagcaggtgagaagccagaaccagtgcgcacccatctccgcaacatgattattgtgcctgagatgattggtagcatcattg

SEQ ID NO: 6750 - DNA, 278 bp, Glycine max
  Clone ID: 701098948H1
gcatgacacagatactgctgggtctgataccaaaaatacactaagttatgcagctgatgtgtcaaagctacatgttgaagaaaaaaagcactcatattctacaaaagatggccatgatactgaaaaattaggttttggagaggcaacacaggaaagtgttcatcaaccgaaaaggactgcaaagattcatgacttctgtttaggcatcccctttggtggatttgttttaactggagggattattggattcccattttcacggagtcctgcaacactag

SEQ ID NO: 6751 - DNA, 279 bp, Glycine max
  Clone ID: 701098949H1
ggtgtacaacatcttggtggaaaaaacaaagtctgtccctggggctaaggtagaaaataacaagttttgcttgtccgtgcactttcgctgtgttgacgaaaagagttgggtgtcattggctgaacaagtgagcttcgtgctcaacgagtacccaaaacttaagctaactcaagggagaaaactgtttgagattcgaccaaccataaaatgggacaagggcaaggctcttgaattcttgctagagtcactgggatatgctaattctgataatgtatttcc

SEQ ID NO: 6752 - DNA, 274 bp, Glycine max
  Clone ID: 701098950H1
gtgggagatggagaagccacaaaacggacaagaaaaggacgaaaccacggcctctttctgcggttacgattctcttcaccgtcttctcaaggataatcttaacccccatcacttccaggaagtcagccgtttgcttactgggcttaattgtggaaaagcacttgaagcagtttctctcccagaatctgcaacttccctctctgcggaacatggttttgacatccaggccttttccttttgtgctgacaaggaactattaagagaacctcggata

SEQ ID NO: 6753 - DNA, 273 bp, Glycine max
  Clone ID: 701098951H1
gttgtggaaagttaggacgaatgaggccaagtcatatgagcgcgtatgaattttctctgatgctggctcctgttgtttctgtttgggattgcatagttcgcaaaatgaggtactcctacagacctgagtgggtgtagtggttcagaacatatcagtagtattagtcttgatacttcaactaattagaatatatttagcattacaattagggaaagagaggaaaagaattacagaccaaaaaaatgtatacaactctaaagaacttcacttgaa

SEQ ID NO: 6754 - DNA, 268 bp, Glycine max
  Clone ID: 701098953H1
gtctggtccaaaaaaatcaagaacaacaatgggtttgttggatctggagaagcacttcgcgttctacggcgcgtaccacagcaaccccatgaacgtggcgatccacacgctcttcgtgtggcctatactcttcacgggccaaatgatcctatacttcaccccacccctcttgaccaccgtaggttccttcccacggtgttggtcctcaactggggcttcttctccaccctcttctacgccctcttctacgtcgccttggattacaagg

SEQ ID NO: 6755 - DNA, 269 bp, Glycine max
  Clone ID: 701098954H1
attgcaaccaatggagagatttgtgtcaacacacttaaaaaggattggaaccctaaccttgggttgcgtcatgttctcattgttgttaggtgtctactaattgagccatttccagaatcagctctaaatgaacaggctgggaaactgctgcttgaaaattatgaggagtatgccagacatgccagactttacacaggaatccatgcaaaaccaaagtccaaattcaaaactggagctatatctgaatctacaactgctctgaatgttga

SEQ ID NO: 6756 - DNA, 273 bp, Glycine max
  Clone ID: 701098956H1
ataatagcacgcactcttttcattctttctctgttctcatttcatcttctacacgcgtttctaatcattattagactcgatctcaacgatgaaggcaacactgctttgtccttgttcttctgctcctctgattctcgacacgcatagcaaccgaacctcggcaacgagacacgcttccaccgttgtttgttgttcgtcgaggaatcaaccctacatcccgaagctcgagccttttagccgaaccaaatttgaaagggccgttaaggaccctcc

SEQ ID NO: 6757 - DNA, 270 bp, Glycine max
  Clone ID: 701098957H1
catgagtctgctgataagacaaagaagcaagttatcaaagcagtagagaaggttttggcaggatctataaggagagaaatggcccttgaagagttctgtgccaagcagacctctgagataatgcagcttaatcgcctggtgcaacagtacaagcatgagagggaatgcaatgccataattgcacagacaagggaagataaaattcttcgccttgagagccttatggatggtgttttacccactgaagagttcatggaggaagagctagtg

SEQ ID NO: 6758 - DNA, 206 bp, Glycine max
  Clone ID: 701098960H1
cttacatgagaatgctcatgaccaaggtggaaggcctcgacgagtttggcacctatacacctggctctccattaacagggtatggagtgtccaaagtcctagaatctggacacccagattacaagaaaggtgatttagtgtggggatctacaaaatgggaagaattcagcttggtgtccccaactcaaatacttttcaaaattgag

SEQ ID NO: 6759 - DNA, 273 bp, Glycine max
  Clone ID: 701098962H1
gttggctcttttgtcttatcgttctccatggctcagaaaaccgagaaagaagaaaccgacttcaaagttccggaaacgattacgctttgcgtcaacaactgcggcgtcaccggaaaccctgccacgaataacatgtgccagaagtgcttcactgcctctaccgccaccacttccggcgccggaggtgccggaatagcttctccggcgaccagatccggcgtctccgcgcgtcctcagaagacatcttttcctgaagagccctcgccggtgggg

SEQ ID NO: 6760 - DNA, 251 bp, Glycine max
  Clone ID: 701098964H1
ggaagcccatttgtgtgcagggttcatattgcactcaagttgaagggagttcaatacaaatatgtcgcagaaaatttgaggaacaagagtgaactgcttctcaaatccaacccagttcacaagaacgttccagtgtttattcacaatgagaagcccatagcagagtctcttgtgattgttgaatacattgatgagacatggaagaacaaccccatcttgccttctgatccttaccaaagagccttggctcg

SEQ ID NO: 6761 - DNA, 220 bp, Glycine max
  Clone ID: 701098965H1
ccccctcactcggaatccctccgattccactcgccttccttctctccgccaaaccctaatttccccttcgctcttccccatcaccacgacgcacccatttccgccactccgacaatgtcgctccagggcagcgccacgcacaacggcagcgtggcggcggcgtcgacggcgagcctgaggctgcggctgcagcctaacaacgagcacacagccgcatggc

SEQ ID NO: 6762 - DNA, 275 bp, Glycine max
  Clone ID: 701098966H1
ttctctctccaccatgcaccaagccatttcccacagaagcttcatccccataggagcacgtggcatgccacacgcaggaggaatcaaagaatccaatggcacctatccatccaaagctgccacaatggtatcggagaacgcggtggtaatcattggaaaacggggatgctgcatgtgccacgtggtaaaaaggttgttacaaggtctgggagtgaaccctcccgtgtacgaggtggacgaggaccacgaagccgccgttgctctccacctgtccc

SEQ ID NO: 6763 - DNA, 274 bp, Glycine max
  Clone ID: 701098967H1
aagattttggcactatcgacatacttgagcactcgcttgctaatggaacagaggtcagcaaaccattgtctgagacatctcggaaaggatatcttgctgccctgtctgcatcaagttactcttatatttctttactcagacactttcttccaatcataaacccagatggatctgcaatttctcttacatacattgcttcagaaaggatcattcctggatatggtggtggtatgagttctgcaaaagctgctttagaaagtgatacaagagtgct

SEQ ID NO: 6764 - DNA, 263 bp, Glycine max
  Clone ID: 701098968H1
tgacttgatcctgcgaagtgattctgtgtattatttccatgacatgatcgttcagatgcgtaagtggtgagttgcagagggaaagacgctttttggttttggatatgattttcgccacagcaacaggttgcaggaaacaatggatcggttggctgcaaagttagaatcaatttataatgctgcagtctggaagacaataaacattataactcattctatgggcggtcttttggtgaaatgtttcctgtgcctgcaaagcgata

SEQ ID NO: 6765 - DNA, 265 bp, Glycine max
  Clone ID: 701098970H1
ctttgttggggtaggaacatttaatgatactttcttcgcccgaacttttggagggatgtttgagtctagtccctttggtggtcctactggatttcctttcccccctggtatgaatccatatcgggttccttgagcatccagccccgggtttggatccatctggcttccttgtgcgtcaagctccagagcctagtagacaaaggaggggaccagtcattcaggaattgaactctgatgaagaaaatgaggaagcaacggaggagag

SEQ ID NO: 6766 - DNA, 269 bp, Glycine max
  Clone ID: 701098973H1
aattaattgcacatttctcactcagtagaagtttggaaaatgattgacatacttctgaatctccagatgttagctcctttcttcctcttcttaatacttccagtgtttttcttcttctgtttcacctcctcaggtcctacaaaaggaaccatccctattccaaaaccataccctataattggtcactacttcgccctcaaaagcgtcggcaaccgccgtatccagtggctatccgatattgtcaaaatctcaccggcctgcacgttcac

SEQ ID NO: 6767 - DNA, 262 bp, Glycine max
  Clone ID: 701098976H1
aaaaggaggggctgaaagagaagatcgaggagaaaatagagggtgatcatcatcatcacaaggatgacgacacaagtgtccctgttgagaaagttgaggttgttgaaacagcacatgctgaggaaaagaaggggttcctcgacaagattaaggagaagctaccagggcacaagaagaccgggggggccagagctaatactcatcctcaacaacaacttgttgaatcattggagcatggtgaaggtgctcatcatgaaggaga

SEQ ID NO: 6768 - DNA, 257 bp, Glycine max
  Clone ID: 701098978H1
cgcatctctcagcattcacaaacaccacttgttccccttgccttgacaaactctcagggaagcaacgattccaagagcacacagactaaaggagattcacctaaagtacctcaggttttggtgagccagctggctacttctttgaccacggaaacctaattttcgagcagcacttgttgctgcactctcaggacgattgttgcaccatcattcactggtataaaaagtgaagtgttgctcatttagtgtcaattgtt

SEQ ID NO: 6769 - DNA, 246 bp, Glycine max
  Clone ID: 701098979H1
ttctaagagaacactaagtcagggttcagttgatatatatgctgctcagtgcaaaaattgcttgaaatggagagagattgatacacaggaagagtttgaagagattagaagtaaagttgctgaggaaccttttctttgcagcagaaaggctaatagttcctgtgatgaacctggtgatattaaatatgattcctctcggacatgggtgattgacaagcctaacctcccaaagactccacaaggttt

SEQ ID NO: 6770 - DNA, 269 bp, Glycine max
  Clone ID: 701098980H1
cattttctagcttccaaaccctaacactcctcttcctcttcgatcatcacctctccacaatgccgccgaagttcgacccctcccagatagtcgacgtcttcgtccgcgttaccggcggcgaagtcggcgcggcgagttccctggccccgaagatcggtcccctcggtctctcccccaagaagatcggagaagacatcgccaaagaaaccgccaaggactggaagggcctccgcgtcaccgtcaagctcaccgttcagaatcgtcaggcg

SEQ ID NO: 6771 - DNA, 268 bp, Glycine max
  Clone ID: 701098981H1
ctctcgggttggaaaaaagtgagcaacggtttctgtgggtggtgaagagcccaaacgaagaaatagccaacgcgacgtacttcagcgccgagagccaagcggatcccttgcagttcttaccggaagggttcgtggagagaacaaaaggaagagggtttttggttcagtcttgggctccgcagcctcaggtattgggccatccatccacgggtgggttcttgacccatgcggctggaactctattctggagagcgtggtgaacggtgtg

SEQ ID NO: 6772 - DNA, 273 bp, Glycine max
  Clone ID: 701098982H1
cggctcgagggaatcatatgctgatattcgtggtttagatgctcagatacaggaaattacagaagcagtcgaacttcccctgacgcatcctgaactgtatgaagacattggtatcaagcctcctaagggagtcattttatacggcgaacctggaactgggaagacgttgctagctaaggctgtggcaaactcgacatcagcaacctttttacgtgttgttggtagtgaattaatacaaaaatacttgggagatggtccaaaacttgtaaggga

SEQ ID NO: 6773 - DNA, 274 bp, Glycine max
  Clone ID: 701098983H1
gaagctttagagaagtggctccagtaccttagagaagaattacctactgtggccttcaagtgcagcacacaacaacaaagatcaaacttaagtgcattgtactggtgctgatactctcatcaaattgttgaaaaattactcaagaagtcatgagctcaagaagtcgatcactgtgggtttgattggcttgcccaatgttggtaagagtagtcttattaatagcttaaagaggtcccatgttgtcaatgttggttctactcctgggttaacaaga

SEQ ID NO: 6774 - DNA, 268 bp, Glycine max
  Clone ID: 701098984H1
gtaattgataacaagctagctattagttcgattttgtagtaagtgaggtgccaatatggtgaagatagctcttggtactttggatgactcttttagcgctgcctctcttaaggcttatttcgcagagttccacgcaactctgatccacgtgttcgctggtgttggatcagccatcgcttacaacgagcttacaaaagatgcagccttggatccaacggggctagtggcagtagctgtggcaacatgcatttgcactgtttgtaggtgt

SEQ ID NO: 6775 - DNA, 259 bp, Glycine max
  Clone ID: 701098985H1
aatgatgaaatttgatgggtgtgtgaatgacacttttcccctgtgaggattggggacattggggtggagtaaagttgttaactttctcagagaccatgcaggggcattgagcttgtcttcttgtttcttctcttctcacttggttttgtcttgtggcaggtttgaaggatgatgatctgtatagagagctgtggacgctatgtgcagggccattggtggatgttcctcgtaatggggacagagttttctaattccctca

SEQ ID NO: 6776 - DNA, 269 bp, Glycine max
  Clone ID: 701098987H1
ctgcactgcatatagcaacccggaaaggtcgtctacaggttgttcagaagttactagattgcagagaaatagacacagatgttattaacaaatctggagaaactgctttggatactgctgagaaaaatggtcgcctggaaattgccaactttctgcaacatcgtggagctcaaagtgccaagtccatcaagtcaccgactacaaacacggcccttgagctcaaacgaacagtgagtgacataaaaagtggggttcataaccactggaac

SEQ ID NO: 6777 - DNA, 254 bp, Glycine max
  Clone ID: 701098988H1
actcgagccgaatcggctcgagttaagcaacacacacttcaatttatcagcatggcctccgttcagtgccacaaaacctgcaaagtgagctgccaacaggaaaaccagcacgcctcgtttgggcagaaagtttctgacttgttcaaagggcatcaacataatgaccacagctccaattatgccacccaaaccaaagtgctttaccagtcagggtcagggttaggcccttcaccaccaaactccaacacaatggg

SEQ ID NO: 6778 - DNA, 267 bp, Glycine max
  Clone ID: 701098989H1
cttcgcaacacaacaaaaaaagacaacccagagagcgcgtcttaataaacgctcttctctgaaaacccccatttcttttcttctttcttcttctctttcgcttcttcgatcttcgatcttcgtcgctgaaaatgagagagtgcatttcaatccacatcggccaggccgggattcaggttggaaacgcctgctgggagctttactgcctcgaacacggcattcagcctgatgggcagatgccaagtgacaagaccgttggtggaggtg

SEQ ID NO: 6779 - DNA, 257 bp, Glycine max
  Clone ID: 701098990H1
aattgatggatgctttagtttcgtgtagttattgagttgtatgctagaaatttcatatccgcaggggcagagagtagaaggaagaagagagaaagagggaagctgctgctgaaacgtaatcgatcttatatctacactctaccatggacactgatgatgatttcacattttgtcaggtcagtgcacctgttgatcttgaaacaaacaagcttgcttcagatatagctgatatttccattgaagaagatcttcaaatg

SEQ ID NO: 6780 - DNA, 206 bp, Glycine max
  Clone ID: 701098992H1
cttttaagtgaagacttagaagccaagatagcagattttggcatctccagggagtttaggacagataaccaagatcaacaatctcaagtgattcacagtgatgctacaaatgaaaaatcaccagtaatgggcacaacagggtaccttgacccagagtactacaagttagggacactgaatgagaaaagtgacatctacagttttgg

SEQ ID NO: 6781 - DNA, 263 bp, Glycine max
  Clone ID: 701098993H1
cggaggagaatgaaactagtttggtccccagagacagcatccaaagcatacatcgaaacagttcaatcttctcggattttccgggaatcgggggtggcggactagtgtcggcaatggcggcggggtggaacgcgcagtgattgtggaaacgtggtcggaggggggagtgatggcgacgagcgtggggttggccgtggcgaggacgcacacgggagggaggcacgtgtgcgtggtgccggacgagaggtcgagatcgaagtacg

SEQ ID NO: 6782 - DNA, 71 bp, Glycine max
  Clone ID: 701098994H1
gaggggtgtgaatgtcaatgctgttaggcccatcatgaataatcctcccagtgcttgaagatcgtggcagc

SEQ ID NO: 6783 - DNA, 250 bp, Glycine max
  Clone ID: 701099001H1
atattattctcctcattccttcatttttaaacctagctccatctccctccactcaccataacatgccatcagaagcaaatgctgccaacaccaacttctgtgtaaatgttagcaacaatggctacattagtgctaatgacccttgaactggggtgcggcggcggaagctatggctgggagccacctcgacgaggtcaagcgcatgctagaagagtaccggagccccgtcggtaagctcggtggagagacc

SEQ ID NO: 6784 - DNA, 285 bp, Glycine max
  Clone ID: 701099002H1
caaaccctggaattaagcacgttatttcattagggttggttttgttgaacagaaaaaaagagaaaaaaaaattatgggaagcgatggcgtgaggaaaccaagattcctatgccttcatgggttccgaacaagcggagaaatattgaaaacacagttacataagtggcctcaatcggttctagacaacctcgatctagtatttgtggatgctccttttccttgccttggcaaatccgatgtagaaggcatttttgatcccccttactacgagtggtttcagttcaa

SEQ ID NO: 6785 - DNA, 283 bp, Glycine max
  Clone ID: 701099003H1
ggttgatgtcggagttgcgtaaaatggtctccgtgtctggtgatccaatccaacgactgggagcatacatgttggaggctcttgttgcaaggctggcctcttcaggaagcacaatctacaaagtcttgaaatgtaaagagcctactggtagtgaactcctttcacacatgcatctactttatgaaatctgtccatatctcaaatttgggtacatgtccgcaaatggagctattgctgaagccatgaaggaggaaagtgaagtccacattattgattttcagat

SEQ ID NO: 6786 - DNA, 283 bp, Glycine max
  Clone ID: 701099004H1
ctcatacttgaagcagaaaaccaggcctaaaccttctcctcctatctccttctctgcaaacccaatcagagtgacaacaacctagtgcggttccaatcaaacaaagatggttaatgcaaaaaccgaggtaccccataagagtgtccttagtatcaagcaagatgacaagttcttctgcaggcttctttcaaaggaaagctccatggccaacccttctttcagaatagcccttgctgtgccatttgtgtgggaatctgagccaggcaccccaaaacacaggttc

SEQ ID NO: 6787 - DNA, 278 bp, Glycine max
  Clone ID: 701099005H1
cgctagcaagggtgttgtagtatagttagagatatcactactacaccaccctgcatagtttgttcagctataatactacttgagcttctttacctacttttcaaacctacattgcacacaaaatggcaacctcttggtcatgttatctacttgcattgcttctttttatgtcaactattgtatcagagagtagagtggcaaggaaggacttgggcctggaccttggtgggttgggggttggacttggactgggtttgggcctggggataggaggtggc

SEQ ID NO: 6788 - DNA, 277 bp, Glycine max
  Clone ID: 701099006H1
ccagcttaaggctaattgcagcgttagttattttcagaatcccgcaagagggagcatcagattcaagcatttccttgcatcagaggtcactttccgaaagacgtattgcccattatattcttcactcccaacggacccccaagtaagtaggcgactaatttgttcccttgccacagaggatttaccaaaggaagttgaaaaatctaacatggagacaccaagggccatattcttacaggattacaaaatgcctgattactactttgacactgtggat

SEQ ID NO: 6789 - DNA, 274 bp, Glycine max
  Clone ID: 701099007H1
agaagtgccctccccagaaaggctatgtgcgtgcttgccttaaaagtggagggtatgttatatcaccagtgaacaaaggaaagcaatcagttgtaaagcatatgcttgctattgattggaaatgctggagattatatcttaaatcttcatcagcacattccataaccattcaaatgcttgggagagttgctgcattacgggaattatttaaagctaaactaggaaattgttcttcatctgattattcatctggagagttgacgagaaacagaga

SEQ ID NO: 6790 - DNA, 274 bp, Glycine max
  Clone ID: 701099008H1
ctataattccttctatcgaccaagttattgcgaaaatcccggttctgaaaaggtcgaatagcaccagagttatgtgcttggacttggagttacacctgtagagaatgaatgactgaactaccaagtcacccaagctcctttttctttgttcttattaacttttctacattttttacctgtttctggacacatgtattctttcattttttgtgtgaaaattttattgacttttcccttatagatgattgattctttattctggacacatgtatta

SEQ ID NO: 6791 - DNA, 279 bp, Glycine max
  Clone ID: 701099009H1
cgaaaagtatcatcggcccctgttgctattgatgccccgggaggctttctgttcgagtggtggtcggttttctgggatatatttattgcaaggacaaatgaaaagcactcagaggttgctgcatcgtatattgagacacaattaataaaggcaagcgagcaacaacagcagcagaaccagcagcagccacagccccagcaatcacagcatcagcaacaacacatgcagatgcaacagctcctgttgcagagagcacagcaacaacagcagcagcagcag

SEQ ID NO: 6792 - DNA, 272 bp, Glycine max
  Clone ID: 701099010H1
ggctcgagcgattcggctcgagaaagattcgattttactgctacggatactgctggacacgagaaatttggtggcctcagagatggatactatatccatggacaatgtgctattatcatgtttgatgttactgcccggctaacatacaaaaatgttcccacctggcaccgtgatctttgcagggtctgtgagaacatcccaattgttctttgcggtaacaaggttgatgtcaagaacaggcaagttaaggcaaagcaggttacattccacag

SEQ ID NO: 6793 - DNA, 271 bp, Glycine max
  Clone ID: 701099012H1
cgctatggcaccaacattcaaggccttcgctcttttcctcatcctcgctctcttctccgccgcctccgctcaagaattatcccccgcctcgtctccggcaccgtcgcctgaagcaggagccgcagactccgtgccttgctccgccatcatgatcggtgcctcgctcgttttgtctctcatggcggtcttcaagttctaggatttcttattctgcatttcatgaatgaattaatattccaaaataccatatatactaaacttgagactttcc

SEQ ID NO: 6794 - DNA, 270 bp, Glycine max
  Clone ID: 701099013H1
ctcaacttctccacctccatcccgcgccccctcctcgaagacctcgccgccggaaccctaaattcggattcgattcagcgagtctcgaaggttcacgatcaatatctggaatttgtaaccctagaggataaccttttttcactggcccacaagccttgttatgttcaactcaacgatccttccgctggggacaaggaaattgaggagcttgttgagaagatcgttggtgggttgtcttgtgtgttggccactcttgcggttgtgccggtg

SEQ ID NO: 6795 - DNA, 274 bp, Glycine max
  Clone ID: 701099014H1
cgtttggcaataactattcttgaagataatggaaagggagttgatactactacacgtgaccaggaaacaatggactttgaagaacgaaaaatctcctttgaagcaaatgagactactgataatagttccttctcacctgttccacctgaaaaatctgagaagttggcagataactatgagcctatagacatcgacgggcaaaaagagacaggagtttgggttcatcacccaggaagtgaagtttcccaaaggtgggagcctaggaaagggaaga

SEQ ID NO: 6796 - DNA, 272 bp, Glycine max
  Clone ID: 701099015H1
cagccaccagtcggaggcggcgaatgcggtggaaagtgagagcattttgtctgctgagacttcgatcctcttccgagatgaaccggaatccaacccgaagcgcttggaccggaccgatgatgttggtttagagcttacgctagggttcgagccggtatcaggtgcgcacacgtggttccggtgaagaagagaaggattgatttgaaggattttagtggctcgtcgtgcaagatggagctggggcttgaatgctcggcttgaggactagtggc

SEQ ID NO: 6797 - DNA, 150 bp, Glycine max
  Clone ID: 701099016H1
catttctcagaaaccctctcgaatgactgagtcaatgcccgccgtggaaccgtcgccggagcctccggcgtccgatatcgtgttcgatgacttctccaccgacttcagcgccttccccatcccctccatggactcgctcttcaacactac

SEQ ID NO: 6798 - DNA, 207 bp, Glycine max
  Clone ID: 701099017H1
caaagtgatgataggttcccgctgcatcactttgagtgggcttggggaaactgaaggaaaatctgacattttggaatttgaaaatgttggattgaatggatgtgttcgagccagtggcctggatcttggtggtttgagtgaatgttttgttaccctccgagcttggagattagatggacgctgtactgaactttctgttaaagctca

SEQ ID NO: 6799 - DNA, 280 bp, Glycine max
  Clone ID: 701099018H1
ctctaaccactttgcttcagctatggagtttcgttgccttccattggttttctctctcaatctgatcctgatgacagctcatgctgccatacctccagaagtttactgggaaaggatgcttccaaataccccaatgcccaaagcaatcatagactttctaaaccttgatcaacttcctctttggtatggtgctaaggaaacccaatctacagatcaaatattcctgtatgatgctaagaaaacccaatcaacagatcaagttcctcctatcttttatggt

SEQ ID NO: 6800 - DNA, 275 bp, Glycine max
  Clone ID: 701099020H1
aagaacgatagagaaaagggtaacgaggttgaccagagttacatacagcagcaccactcgttgtcaatgccaatgatgttttcgggttttaacagagagaaggagatgtcagccatgatcactgctttgacacgtgtggtttgtggagattattctcttgttcatcacaatattgataatactaatagtgcaattgttggtggtggtggtggtgatgatgtttcaaatatggcttctggttctatgccaccttcgtctacttctttatctcatgg

SEQ ID NO: 6801 - DNA, 275 bp, Glycine max
  unsure at all n locations
  Clone ID: 701099022H1
catggctttctttattctctccttcctcttccttcttcttgtttcatctgcttcntgttgtgatcgctgcttgtatcaatccaaggcttcctatttctccaaagcttctgctctttcatctggggcatgtgggtatggctctttggcactagacataagtggtggacaccttgcagctggtgtggattctctcttcaaaaatggagcaggttgtggtgcctgctttcagataagatgcaagaacccaactctatgtagcaaagaaggtaccaaag

SEQ ID NO: 6802 - DNA, 272 bp, Glycine max
  Clone ID: 701099023H1
acaatatattgggtgaagaagaggggggtcttggttttcaattagctcatcaattgatcaaaagggcattgaccatccctggggcaactgttcattggtatgataagccagagatgagaaagcaacgaaagatgggccatataaccattgttgggccttcccttagcaatattgaaagcaatcttgctgtattggtggaagggaaagaattagatggcaagactgcagttgcaccacatgtggggatcataatgggttctgattcagatcta

SEQ ID NO: 6803 - DNA, 270 bp, Glycine max
  Clone ID: 701099025H1
cttgttggtagaagaaattgggcgtgtgggagttgttgaatcgggaagcaaaaaaaatgagaatccatcacatagcatgcctccaagacaattattcctatctgatcgtagacgagagcacgaaggaagccgcggcggtggacccggtcgaaccggagaaggttcttgaagttgccagctcgcacggcctcactctcaaattcgtcctcaccacccaccatcactgggatcatgctggtggaaacgacaagataaagcagctggtgccag

SEQ ID NO: 6804 - DNA, 271 bp, Glycine max
  Clone ID: 701099026H1
gaaaattggttcttctgaggagagtagctacccgaatggatcaactctactgctctgttgcccacttgaaaacgagttctggggcttggattttcatttttccttaaagcactgcactgtggtatttgctccaatatgtagttaatgtgtgaactggttcatatttcatactatatattttcaaggtggggtgcagaagcagcgtgcggccaatctgctgtgttaatgtgtttttttgttttttatcgtttccgatttgtttttgaagtac

SEQ ID NO: 6805 - DNA, 269 bp, Glycine max
  Clone ID: 701099027H1
ggaagagggtggctgttgttaacatcgtattccttgttcttctcattattgtatactccatagggtgctgtgcattcaggaacaataggagggaaaattggaagggatattctcgttagctagattactcagtattactagtgagtagatcagtttgctagacaatctggtttatatgttggatttatttttttgggctttatgtgtatgctggattatactgttttcagtacagtctgttatggaaattgctcaattttatatagtag

SEQ ID NO: 6806 - DNA, 269 bp, Glycine max
  Clone ID: 701099028H1
aacccttcttctcttctcttggtttcgttctgtgcatctgccaaattaggattaggattagggctaccaataccaataccaataccaattctattctatggcttgctcaagcgcccaaatacacggtctcggaaccccttcctcccgaaccctatttttaggtcagaggctaaataccaaggccgcctttatcaagctcaagtccacacctagaagactccgccctctcagagtggttaatgagaaagtcgtcggtatcgatttgggaa

SEQ ID NO: 6807 - DNA, 271 bp, Glycine max
  Clone ID: 701099031H1
ctcgagcggaataagctacttcatggtcccatgcagcacctaaggtgtgatgggaacaatgatagtagtctgagtgaagtacttgagaatatgcgcgcccttaacagaatgtatgatcttgagacagaaacttccttgatcgaagaaaagatcagagtcaagatggaacgggttcagaagtagattcttcttcaattggtttagttttacttgattactgtgggggctgcaatcctcgccattttgtacactacagtagttgattgaggcc

SEQ ID NO: 6808 - DNA, 260 bp, Glycine max
  Clone ID: 701099032H1
ctcgagccgaatcggctcgagtcgagcgtttacatacagttattttgctgcgattcgtatactgattaaattaatccatgatctgtttaagttcttacctgtatacttgaaatgcttattgagaacctacagtaaacagaagcccagagtagtatcttcgatttggccatcctattttgaatgttgcattgttttttaatgtatttcaacttccatcttcaattcactaatcatatatgttatctatttgaggttgactc

SEQ ID NO: 6809 - DNA, 160 bp, Glycine max
  Clone ID: 701099033H1
gaatcaaagaaaggggtggtggctgcttcgaaagcttaataatttgtttatttccagaacatcatagttttcgcagcagcaaactaacaaattactcatatcatataataagatggcccgttctctctcggaagccaaacgtattggggtccttgttgct

SEQ ID NO: 6810 - DNA, 272 bp, Glycine max
  Clone ID: 701099035H1
ctcgagcgattcggctgagtgatttcttcgtttggaggacaccctcaaaggtgttctactgtgaaagttagccacttttgaagatgaattgttataatcttcagaagaatgccttctcagcctgtgaagagatgagaggctctcttcccattgctgatcagaatggacctgtcttttgtcctaagccacgccgagctggggttttaatgaacttgcctattcgaccagtaaaatggcatttaggtcaacaagctgaggggtctgattcaaaa

SEQ ID NO: 6811 - DNA, 276 bp, Glycine max
  Clone ID: 701099037H1
atcccctttccagcatggactgtcaaatccagctacaagaaactctacgaaggtctctcgacagcaggtactgcgattctggacgaagcggagcgcgtggggataaagagggacgaagcgtgccacaatcttgtgttcatgttatcgttcaacgcgcagggtgggttagtgaaccagtttccgattttgatcaagtggctaggactggctggggagggtttacacaagcagctcgcggaggagatcaggaccgttgttaaggacgaaggaggggtg

SEQ ID NO: 6812 - DNA, 274 bp, Glycine max
  Clone ID: 701099038H1
cggctcgagctcgagcgaatcggctcgaggaagattcagttcgggattttcgcgcttcgacctcaactatgcagcgcgtgagtgagggaacatggacggtgccgaattgtccaacataaagaaatggattgtgatgtatcctgtttacataaactccaaaaaaacgatggccgaaggcagacgcattggcctcgccaaagcctgcgaaaaccctacttgcgctgaaatcggtgattgctgcagctatctgaagcttccttttgcaattgagata

SEQ ID NO: 6813 - DNA, 274 bp, Glycine max
  Clone ID: 701099039H1
ccagaaccagatctagggtttattttccttttcttttagaatttgaacaagttttgcgtcttcaaaggaaataggatgggagaattgaaggacactgaggcttacgaggaagagctcatcgactacgaagaagaagaagaaaaagctcccgattccgctaaacccgttactgaatctggcaagaagggttatgttggcatccatagttcgggatttcgagacttcctgttgaaaccagagcttcttcgagccattgtagattcaggatttgagc

SEQ ID NO: 6814 - DNA, 273 bp, Glycine max
  Clone ID: 701099040H1
attttgcgggtatttgtgagtgtgtgagagagagagcgagcagtttcagacacagagagaggggtttgggattggagggattgacgctgcgtctcttcctcttctctttcgatccatccctcattcctaatcctccaatccaaccacctcagcctcacactcacatatacacatatctgaacgcgtatcgtccctcctatggcttcaaagcgcatcctcaaggagctcaaggacttgcagaaagagccaccaacttcttgcagcgctggtcca

SEQ ID NO: 6815 - DNA, 268 bp, Glycine max
  Clone ID: 701099043H1
ctccctttgattgcatatatctgagaatcacccttttattgattcaaactttggaaatctcaatcttcacccttatgattgaacttaacatgaagcatcaaggcaagcttagagtgtttcttccaaatatgataatacttgtaaccatccttctccattcaacaacatggattagtgcacaggaagttgaggatgaaagtgagtttgattacataaaagggagtgagaagggtccctcacactggggggaactgaagaaggaatggga

SEQ ID NO: 6816 - DNA, 268 bp, Glycine max
  Clone ID: 701099046H1
ctgctcttgagaacaagttattgttggcagggtttacagaaacacaagtcttacaattaactgggatcaaagctaaaaagccttcatggaaaattggttcatcttttgcgctaaagaagctgataaagagttcacctaaaatgcaaattgattttgattcggatctaattgatgaggatagtctcttgactgaagaagatttaaagaaaccccagctgccacctggtgattgtgaaattgggagcacaagacaagcctgcaaaaattg

SEQ ID NO: 6817 - DNA, 270 bp, Glycine max
  Clone ID: 701099048H1
tgagataccagttcatgctcagaggcttcaatatttggcctttgcaagttggttaggaattgttctttgcctaggttttaatgtagttgctgtgactgtctgttggattagaggcggcggtgttaaaatttttttccttgcggttatatatgcgctacttggtgttcccctttcatatgttctttggtacagacccctctatcgtgctatgaggacggacagtgcactgaagtttggttggtttttcatgctctacttgcttcatattgg

SEQ ID NO: 6818 - DNA, 202 bp, Glycine max
  unsure at all n locations
  Clone ID: 701099049H1
cggaagagtgggtgttggtggttgtcctcctccctcctcatgggtatggcaaccctctcctcctctcttcctcttttccatcgctaccctaaccctaaccctaatccttcgctctttcgcccctcccttttcccctctccttctccttctctcgcactaaaccccgtcgtgncccctttctcgttctcgctctctctcccca

SEQ ID NO: 6819 - DNA, 275 bp, Glycine max
  Clone ID: 701099050H1
gtcagcttagaattattattagtgtgacattattaattaattcttggctagacaacaacatggcctccgccgcagccgcagacggactcttccggccgatctacgaggcctgcatctccgcctacgacaacgacgtggagcgccgcccctaccacaagaactgcggctccgctctgcacagcaagtcgaggaggaacagcagcagagcgtgcaggcacaagttgccaaaatgcaacaacgtgtcctaccctatgaggagggcttggagtgaaggg

SEQ ID NO: 6820 - DNA, 274 bp, Glycine max
  Clone ID: 701099051H1
ggcagtggcagcgacgatccggctcacggtgccggccggacgagctcggccggcgccaccggttggaccggcgctgggtcagtaccggctgaacctgatggcgttctgcaaggacttcaacgcccgcacccagaactacaaggcggagacacccatggccgttacgataacggcgtacaaggacaacaccttcgagttcaccgttaagtcgccgccggtgtcgtggtacctgaagaaagccgccggcgtggaatccggtagcagccggcccggt

SEQ ID NO: 6821 - DNA, 224 bp, Glycine max
  Clone ID: 701099052H1
cagcatccctggatcttgctggactagttgcatctctgaagttggttgggggtaacttagctgatcacagattctttctccttggtgctccagaggctggcactggcatagcagaactcatagcacttgaaacatcaaaacagacaaatgctccactggaggaagtgcgcaagaatatttggctggtggactcaaagggattgattgtcagttctcgcaaagat

SEQ ID NO: 6822 - DNA, 154 bp, Glycine max
  Clone ID: 701099053H1
aaaattaatcatcttacttatttattctccgaaaatggttgatttacattggaaatcaaagatgccaagttccgacatgccttccaaaactctaaaactctctctctccgacaacaagtccttagcctctttgcaactacccttccacacaaca

SEQ ID NO: 6823 - DNA, 272 bp, Glycine max
  Clone ID: 701099055H1
gaaatggctaagaacagaccaattgatactaaggggaagaaaggatttaaagtacttgtgctcaatgacgttgacaaactctctagagaagcccaacattctctccgcagaaccatggagaaatacagtgcttattgcagattaattctatgttgcaatagttcttctagagttacagaagcaatccgctctcgatgtctcaatgtgcgaataaatgcaccaagtgaagaacagattgttgaagttttagaattcattggtaagaaggaagg

SEQ ID NO: 6824 - DNA, 273 bp, Glycine max
  Clone ID: 701099056H1
ctctgacattggcaagagagctcgcgatcttctgttcaaggattatcagaatgaccacaagttcaccatcaccacttacacttccaccggagtggaaatcacttcaactggagtcaggaaaggtgagacatatttggccgatgtcagcactaaggtgaagaacaagaacatcacaactgatgtcaaagtggacactaactcaaatctgcgtacaatcattactgtggatgaacctgcccctggactcaagacaatttttagctttaattttcc

SEQ ID NO: 6825 - DNA, 270 bp, Glycine max
  Clone ID: 701099057H1
acgagatccaccagatgtacgagacctccttccagaccctctcggagcctctcttcaaagacaccccctggccctccgtggacgccgtcgctcactacgtcgacaacgaccacgtcttctgcctcctctaccgcgagatgtggttccgccacctctacgcccgcctcactcccacgctccggcagcgcatcgactcgtgggataactactgcagcctcttccaggtcgtcctccacggcgtcgtcaacatgcagctccccaaccagtggc

SEQ ID NO: 6826 - DNA, 269 bp, Glycine max
  Clone ID: 701099058H1
ttgatacaaaggctttcaaagacaccgttgacttgtttgttgagaggtacagagatcaaaacatcaatgttgtcgcaggagttgaagcaaggggctttatatttggtccacccattgcattagctattggagcaaaatttgtccccatgaggaaacccaataaattgcctggggaggttatctcagaagagtattctttggagtatggaacagacaaaatggagatgcatgtaggggctgtacaacctggagaacgagccttaatcata

SEQ ID NO: 6827 - DNA, 267 bp, Glycine max
  Clone ID: 701099059H1
ggcagaagtcctaggagtgtaaaacagagacgcaaaatgaagacgatcttgtcgtctgagaccatgaatattcccgacggcgtgagcatcaaggttcacgctaaggttttcgaggttgagggccctcgtggaaaactcgtgcgagacttccaccatctgaacttggacttccaacttattaccgacgatggcggtaaaaggaagctcaagattgattcttggtttggttctcgtaaaacctccgccgccatccgcaccgccctcagc

SEQ ID NO: 6828 - DNA, 268 bp, Glycine max
  Clone ID: 701099063H1
cggagcatggcagatctcaagtccacattcttgaacgtctattctgttctcaaatctgaactcctccacgaccctgcttttgagttctccgatgatgctcgtaattgggtcgaccggatgctggactacaatgtgccgggaggaaagttgaaccggggactgtcagtaattgatagctacagattgttaaaagaaggacaggcattaaatgatgacgaaattcttcatgccagtgctcttggttggtgtattgaatggcttcaggcat

SEQ ID NO: 6829 - DNA, 277 bp, Glycine max
  Clone ID: 701099064H1
cagccctcttctccgccacttctgaatctattgaatcaacactcatgtcggacgaagagcaccattccgagtccaaggccgacgccggagcctccaaaacctaccctcagcaagccggtaccatccgcaagaacggctacatcgtcatcaaaggccgcccctgcaaggttgtggaagtttcgacttccaaaactggaaagcacggtcacgctaagtgtcactttgttggaattgatattttcactgccaagaaacttgaggatattgtgccctcttc

SEQ ID NO: 6830 - DNA, 199 bp, Glycine max
  Clone ID: 701099065H1
actcttgatcaccataaccatgtcaatcgcaacaacatcccctcacaccgccctcttcccaaaccgcaccaaccctttcactctctcctcctctcaaacccacatccatcaaatgctccatccaactccatacccaagccccgcacctcacccactcccaagatcgcgtcttcaacttcgccgctggtcccgcaacctc

SEQ ID NO: 6831 - DNA, 274 bp, Glycine max
  Clone ID: 701099067H1
gaacaaacaaactagtcaatcggagggatatgggcttattgcgtttactagtcgtgctggtgctgagagagtccttcaaacatacaatggcaccattatgccaaatggcgggcagaacttcagattgaactgggcaactcttagtgcaggtgagaggcgtcacgatgatagcccagatcacaccatatttgttggagacctggctgccgatgttacggattatcttcttcaagagacatttcgggcacgatatccctcaattaagggggccaaa

SEQ ID NO: 6832 - DNA, 270 bp, Glycine max
  Clone ID: 701099068H1
tgacaaggagattctgcaaattgtgaaggagaatttcgacttcagacctggaatgatcaccattaacttggaccttaagaggggtggtcataggttcctcaagacagctgcttatggacactttggaagggatgatgcagacttcacctgggaagttgtgaagccactcaagtcagagaagcctcaagcttaagagtgttgttaagttaatcactcccttcagtggatgtcttgctgggtgtggatgaataatttgcgtgtttcatgact

SEQ ID NO: 6833 - DNA, 272 bp, Glycine max
  Clone ID: 701099069H1
ctctttattactaacatttcttccattcttagcttttgtttgtcccatcaaatttttgaagatggccaagagaagtgttgctgctaattcttcttttgagagtactagcttggcttctctggatcaaaagttggccatggccaagcgctgctctcatgacggtgcgatggcaggagccaaggcagctgttgctgctactattgccactgccattccaactctggctagtgtaaggatgctaccttgggcaagagcaaatctcaatcacactg

SEQ ID NO: 6834 - DNA, 269 bp, Glycine max
  Clone ID: 701099070H1
gtgaagaagctgaaaattcttgctaagcgctgcaaactacagcatctcctgcaaatgctttatagacaacgtccaaagtggggcacacctttccccagctttaatcgtactccatctcttggttcagccggaagttgtttttcggatgctatattggaagctaaatcaaataaacttgttgggtggacatgcaacatttgttctgacacagtgccccatatgcatgttcacaaagttatattgcagtctggttgtgattatttacaagg

SEQ ID NO: 6835 - DNA, 270 bp, Glycine max
  Clone ID: 701099071H1
ggaagaactgcaaaacatgttgaagggaagaactttgagttgcaaaaagaagagttccctaaaggcaagcgtaaagctcgaaaacgtaggcgccttgctcttcagggaagagcagtgaaggatgtcaggaggagacagaaagttagctcgctaacggatgaggatctgggtccattctccaattctagtgaagagagcatgttcagtgaagatgaaattcaggctggcagaatttgtcctgctggaagttcatcagatgaggcaggtagt

SEQ ID NO: 6836 - DNA, 271 bp, Glycine max
  Clone ID: 701099073H1
cgaaaccctcacccgcgcgcctctccttcccgcagcctccattaccggcgcatcctgcgtctccggcgccattgaaaccctaataatctgctaaagcatcaaactcagtcgtcgttgctgtcgaactcgaaccagtgagactcgcacgagcgaacaccagtgctgcaaagaagtgagaagcaacacccactagagaaaaaaaggaaaaaccctaattgtaaaatggaggctgagacagagactatggtggagaagagggagataatcaaca

SEQ ID NO: 6837 - DNA, 259 bp, Glycine max
  unsure at all n locations
  Clone ID: 701099074H1
gtccaagccaacaagaaaaacgggatattgtcctacttggggacatcgttgtgaccattttgcatttcctcctcctccacaagctgatagaagccnggctggaccacgcccatgccctgtgtgttatattccagtggagcaagctatagctagtatgccaagttccccatcagaatctcccatacttcgcactttgacatatgtgcatgatgaaaatccaattgacagtcagccacatggtggctctgattttggtgga

SEQ ID NO: 6838 - DNA, 267 bp, Glycine max
  Clone ID: 701099075H1
ccggaggatgaaatcctccgagaaaagatattccgacacgtggacgaggcgtgtcgggagtgggggttcttcctcgaggtgaaccatggggttagccatgagttgatgaaaagttctagggaactgtggcgcgagttcttcaaccagccacttgaggtgaaggaggagtatgccaactcccccaccacttatgagggctatggaagtcgcttgggagtgcagaaaggtgccaccttggactggagtgactacttctttctccattac

SEQ ID NO: 6839 - DNA, 267 bp, Glycine max
  Clone ID: 701099076H1
cagcaagatcgatctctgtccagtcgaatcttcccaacatggccgactctcaagttactctgcgcacgcgcaagttcatccgcaaccccctcctcggacgtcgtcagatggtcgtcgatgtcctccaccccaaccgcgcgaacgtttccaaggacgagctccgtggcaagctcggtgagctgtacaaggccaagaaggacgatgtctccgtcttcggtttcaagacacacttcggtggcggcaagagcaccggcttcgctctcatct

SEQ ID NO: 6840 - DNA, 265 bp, Glycine max
  Clone ID: 701099077H1
ttttgtgcagtgccatcgtagattttcttgggagcaatgttagatgcttggtggcatgagtaatagtgacgcatggtaatttgaacggtgcagctggatgattaaccggtgctgatagacaccagagtctgtctacagactgccattttaccattggatatttatcggtattattagatagcagcagtgtaatggcttatgcatttatgtggtttcacttactgtatcctgtgtggcagctacgctgttttcatgaacgtcatgt

SEQ ID NO: 6841 - DNA, 111 bp, Glycine max
  Clone ID: 701099078H1
ctttccgattctctttctgagatccaaaagccttactttttgtccctctcaattctccttgcaatctctagaatccgcttcttcaattcccagttttctccacacaacata

SEQ ID NO: 6842 - DNA, 266 bp, Glycine max
  Clone ID: 701099080H1
ggtttatcgagggtttcgttccttcctctctgcaacaccaacggcgaaacctgggcgacgtcgtcgctctccctccggttccgtttccggctcctcctctcgctcctcttccccctccgactctcgttcctcctctcgctcgcgctccctttctcggtcacgttctccctcgcgctccagatcctcttccccctcctcctcctcttcctcccgaagctcccgcagccgcagccctcccccgcagaggcgccgaagtcctgctgacg

SEQ ID NO: 6843 - DNA, 276 bp, Glycine max
  Clone ID: 701099081H1
cagcatctgcattatgagtacccctgtcgttcgacgcatttccgaatgcttcatcaagccacatcgtccaatcgaagagtctaaccaaatatgttatttagcaccttgggatattattctattgtcttatcactatatccagaagggtctactcttcaagaagcctccaacacttgtcgatcaacagaatttcatagaaaatctgttggagaagctcaaacactctctttcgttcaccctctcccatttctatcctttggctggtcgccttgtcac

SEQ ID NO: 6844 - DNA, 271 bp, Glycine max
  Clone ID: 701099082H1
ctcgagccgcaagtacagaagtcataaacgcagccggttcgttatcagatcttgctttggtggtcttgagcaatcttttattgctagtggtagtgaggattctcaggtttacatatggcacagaagctcgggggatttaatagagacattgcctggtcattctggagcagttaactgtgtgagctggaatccagctaacccacacatgttagcctccgccagtgatgaccggacaattcggatatggggcctaaagcgcctgaatgtaaag

SEQ ID NO: 6845 - DNA, 270 bp, Glycine max
  Clone ID: 701099084H1
catcaggcatgcaacaggcttatcaagtccaattggtgctactttccttgagtgtctatttcctttgtatccacctaagtcttgctcccttgaaagtgatgagaatttggaaaaagtaacttcaagtgcacaagaactaagaaagacagagcttgatcttgaagattgtgccggtgactcggtaaggaggccaccaacacttggagagctgattatgatgagccgaagaagaagctgcagaaggaaagcagtacaaatgaacaaatggga

SEQ ID NO: 6846 - DNA, 269 bp, Glycine max
  Clone ID: 701099086H1
gcgggaacaaattgacgagcaaatccctttcattttccctttaaatttatctctattatttacacccataaaattgatttaaatcaaaccaacctataagcaaaactaatatatcactgaattagaaaaaaaaaaatggggaagaagaagagaagtagggtttccgaagacgaggaaatcgaatctgacaccaaccctttcgatcaaaacgaacacactctctaccaggttcttggtgtggagaaaacagcatctcaacaggaaataaa

SEQ ID NO: 6847 - DNA, 266 bp, Glycine max
  Clone ID: 701099087H1
gggtcttcaaaaatgcggatgagttgcaatggatgtcgagttctgagaaaaggttgcagtgaaaattgcagcatcagaccctgtttacaatggatcaaaagcccagaatcccaagccaatgctactgtgtttctcgctaagttttatggtcgtgctggtctcatgaacctcgttaacgcaggccccgaacatcttcgtccagcgatctttcgctcgttgttgtacgaggcatgcggtcggatagtgaacccgatttacgggtctgt

SEQ ID NO: 6848 - DNA, 266 bp, Glycine max
  Clone ID: 701099088H1
cacccacctccaccacttctcctactgacgtcataatctgtttaatatgctccaaatcccaggcatgcagaggtataccccaacacaacaactagactaggcgatagccaattctcagctgaggcgtccatttttctagtgaggatgagccttgctcatttgcttccttagccattggtgtagctctggtctctctaagtcccattagcaatatcatgtcatcgccaatatattttggcgtgatgtcttcacctccattccacaca

SEQ ID NO: 6849 - DNA, 265 bp, Glycine max
  Clone ID: 701099089H1
ctcgcagctcgtgacaccaccgccagtgtgctgacgtggatcgtcaagtaccttggtgaaaaccccagtgtcctagaagctgttactgaggaacaagagtgcatattgaagagcaaggaagaaagtggagaagataagggtctaaattgggaagatgcaaaaaagatgccaataacttcaagggtcattcaggagactctaagagttgcttcaattttgtcttttactttcagagaagcagtagaggatgttgaataccaagggt

SEQ ID NO: 6850 - DNA, 265 bp, Glycine max
  Clone ID: 701099090H1
gaaaatatgagaggtaaacatggaaaaacaatgatcgttgtaatacatagaagcataacatttatgttgctcgccgttgtcagaagtttgctacatttcaagagaactgaagtcatatgatatgattccggatctgacaaaagcagtctggaatgtattggaacttagacttctggttttaatcagtttcttcttgcaagtattcctaatagtttttggcaaccgaagaaaatgcatagccgatgcaaggctacaagtcagtgtc

SEQ ID NO: 6851 - DNA, 255 bp, Glycine max
  unsure at all n locations
  Clone ID: 701099091H1
ccacgatatggtcttgaagtaggacttacaaattatgcagcagcttattgcactggtctcctgttggcccgaagagtcctcaaaacacttgaaatggatgaggagtatgaaggaaatgttgaggctactggagaggattattcagtggaacctgccgagagcaggaggccattccgtgcactccttgatgttggtcttgttaggactacaacaggaaatcgcgtctttggtgcctntaaggcagctctggatggg

SEQ ID NO: 6852 - DNA, 261 bp, Glycine max
  Clone ID: 701099092H1
ttccattcataatgggtgttttcacattcgaggatgaaatcaactcccctgtggctcctgctactctttacaaggccctagttacagatgccgacaacgtcatcccaaaggctcttgattccttcaagagtgttgaaaacgttgagggaaatggtggcccaggaaccatcaagaagatcactttccttgaggatggagaaaccaagtttgtgctgcacaaaatagaaagcattgatgaggcgaacttgggatacagctaca

SEQ ID NO: 6853 - DNA, 267 bp, Glycine max
  Clone ID: 701099093H1
gagagatgccacccacaagacaagaaagcgttgctccaactccagaaggacctcggcaacccttatcacatcatatcctggaacgcaaaggaggattgctgcgagtggttctgctgcgttaagtgtgacgagaaaacaaaccgcgtcattagcgttgccttatcatccccttttccagacaccaatctctcggcccaaatacctccctctgtgggtgacctcccttacctcgagtccctcgtcttccacaaattccccaaactcgtg

SEQ ID NO: 6854 - DNA, 202 bp, Glycine max
  Clone ID: 701099094H1
atgagtctcctgattcatgtagtttaatgtttgtgtaaaatatcatttttagacgctagtcacaataatggctaattaatcgtttagtttgagctacaggctcttctacattctatgttgtaatcctagaacataggctatataaattgatatatcattctttttcttgtattgtgatcatcataaattttgatctgttatc

SEQ ID NO: 6855 - DNA, 265 bp, Glycine max
  Clone ID: 701099095H1
ctcgagccgcgaaacagtttccatctctctcacaaaatgacaacactatcacattgctcacttctcttcctcttcctcttcctctccaccctccacatagcttccaccctctcaacccccaccaacttcatcaagtcctcctgcagcactccccagtacccagccctctgcatccagtccctctccgtctacgcctccaccatccagcaagacccccacgagctcgtccagacagccctctccctctccctcaaccacaccgagg

SEQ ID NO: 6856 - DNA, 267 bp, Glycine max
  Clone ID: 701099096H1
ggtacaccggagttcatggccccagagctttatgaggaggaatacaatgaacttgttgacatatattcctttggcatgtgcatcttagaaatggttacctgtgagtacccgtacagtgaatgtaaaaatcctgcacagatatataagacagttacctctggtataaagcctgccgcccttgctaaagtaaatgatcctgaagtgaagcaattcatagagaagtgtctagttccagcatctatgagattgtctgcatctgaacttctg

SEQ ID NO: 6857 - DNA, 271 bp, Glycine max
  Clone ID: 701099101H1
cacggtcctaaaaaatagttcacaatccatatccctcctctcttgttatatatagacacaaacgtaagaccttttgtttcttacttgtaataattcttataacacaacacaacccatggccaccacctctccattcctcctccttccactcctcctgctgctccacctcgccatcgccgctcacggcatcggcatcaactacggcacgctcggcgacaaccttccaccgcccgcggcgtgtgcgaacttcctgaagacgaagacgaccatc

SEQ ID NO: 6858 - DNA, 267 bp, Glycine max
  Clone ID: 701099102H1
cgaaggtatcgcagtcaaagcagcagatcttgatatttctgctatcatgggcatgggttttcccccttacaggggaggcatcatattctgggctgattctcttggatccaagtacatatattcaagattggagaaatggtcagagttgtatggggaattcttcaagccttgtgcctacttggctgcaagagctgccaaaggaattcctctgagtgcctctttggagcagcaggcaaagtctcgcatgtaagaaaaaaacagctcatt

SEQ ID NO: 6859 - DNA, 260 bp, Glycine max
  Clone ID: 701099104H1
gctgctttgagagagggtctgccactgaggaaatcagaacaagctcactacttggactgggctgtccatgccttcagaatcaccaatgttggtgtgcaggataccactcagatccacacccacatgtgctactccaacttcaacgacatcatccactccatcatcgacatggacgctgatgttatcaccattgagaactctcgctccgatgagaagctcctgtcagtcttccgtgaaggtgtgaagtatggtgctggaat

SEQ ID NO: 6860 - DNA, 259 bp, Glycine max
  Clone ID: 701099105H1
ggaagatatgatatgagatatgagatatgagatgggagtctccattctcacccgtttccatttctctctccctctcccacgcgccaccgccactcagaggattttccatttctgccctccgattgcatgccgctcatccatggatcagtcttctggcctgaatctggaagatctgaaatgggaccattccttcgtcagagaattgcccggcgatccccgccgcgactcctttccccgtgaggttctgcatgcttgttac

SEQ ID NO: 6861 - DNA, 257 bp, Glycine max
  Clone ID: 701099106H1
taacaccagaggagaaaaagcttttgtcagatttgaaccctgaaatcaaagaccttaaagagaagcttgttgcttgcacgactgatcgcattgagactgaagcacggagagcagagctggataccaatctaaccactaaccttaggagaaggaaacaagagctggaggctgtaatatcatctgcagatgctgactctttggttgctgatgctgaatcaaagtggcaggaacttagtgatgctaaaatattggttgat

SEQ ID NO: 6862 - DNA, 257 bp, Glycine max
  Clone ID: 701099107H1
gaatcattgtacggactgaggtcgaaatcgcgattttcgtgtttcgcgccgccgaggccgaagccagtgatgacgtcagcgagcaatgaggagggtctaagaacatcaaaatcgagggcgttaaagatttacaacaatctgaagaaggtgaagcaacccatctcaccggggggtaagttaagtaattttcttaactctctgttggcgacaggggggagcgtaaagaaaaccaaaacctacgacgacacgaaagctcc

SEQ ID NO: 6863 - DNA, 252 bp, Glycine max
  Clone ID: 701099109H1
gcaaggttcctgagtgggttgaaggaggaaagagttgaagctgcaaaggtctttaaatcaggtggcattggtgatattgtgactgatcaacctgtagacaagcagaagttgattgatgatgttaggaaggctctttatgcagccagaatctgtagttatgcacagggaatgaatttgatccgtgcaaagagtattgaaaagggttgggatttgaagttgggtgaactggcccggatttggaaagggggttgc

SEQ ID NO: 6864 - DNA, 250 bp, Glycine max
  Clone ID: 701099110H1
ggcttcaacatctacaagggtgaacaaggaataagccaagttttgtcgatctctgcgtacccctttgaggcaaggagctccattgaggaattgcatgagctttgcaaacctttcttctacaaatctcagcctctaacgttcgcaagcctcttcacctttgtcatcactctcatcctattcctgtgagctacacaaatctgtttcaacgcaagagaaacaacaatagaggagccagccggcacatgctgtc

SEQ ID NO: 6865 - DNA, 254 bp, Glycine max
  Clone ID: 701099113H1
gaatgatttaccaggattgactgatgttgagaagccaaggatgagaggcccaaagagagcatccaaaatccgtaaactgttcaacctgtctaaggaggatgatgttaggaagtatgtcaacacctaccgtcgtacatttacgacaaaagctgggaaaaaggtgagcaaagctcccaagatacaaagactggtcactcctcttacgctccaaagaaagcgggcaagaattgctgataagaagaagaggattgcca

SEQ ID NO: 6866 - DNA, 122 bp, Glycine max
  Clone ID: 701099114H1
aaacaatgtaatacgtatacaaatataattgatccaatgcatcagttatatttgtatacatattacatttgttttgaatttatgcatgtattgcatcattatcttaaaacaaaaaagagggg

SEQ ID NO: 6867 - DNA, 255 bp, Glycine max
  Clone ID: 701099115H1
tctcgagccgattcggctcagggcgacaatcacaaggtcatgatgagacttatgtgaaacagctttctgattatataataccaaatttggtggaggctttacacaaggagccagaagtagaaatttgtgcaagcatgttggatgcattgaatgaatgcatacaggtctctggatcacatctagatgaaaagcaagttcggagcattgttgatgagattaaacaagtccttacggccagttcatcaagaaaacatg

SEQ ID NO: 6868 - DNA, 255 bp, Glycine max
  Clone ID: 701099116H1
tctcgagcgattcggctcagtgagacttgagttggaaatcatggcgattggtaatgagaatcagccacaacaatctgaaggcaaagtgtggaatttgttcaagcttccctttcgccattcaacttcaactcctcacaatcacaatcaagtttccacctccaattctgtctctccctttcccaaatcgctcctcccctcaccacgtcgtcttaagcttgatccttccaacaagctctacttcccttatgagccggg

SEQ ID NO: 6869 - DNA, 257 bp, Glycine max
  Clone ID: 701099121H1
gtcgcttggcgcagagctttgagtataactatggtgattttattcccatcttgagacccttcttgaagggttacttgaagatttgcaaggaggtgaaggagacgaggttgaagcttttcaaggattacttcgttgacgagaggaagaagcttggaagcaccaagagcaccaacaacaataatgaacttaaatgcgctattgaccacattttggatgcccagagaaaaggcgagatcaacgaagacaacgtcctctac

SEQ ID NO: 6870 - DNA, 255 bp, Glycine max
  Clone ID: 701099123H1
ggaaaatggatggtctattttggagaatctttggttgtttcaccttccaaacaaatctagaactcatggtcatctctttgagcttactggtgccaacaaaagggtgagaattttccccggaagaaagctagactatgaactgagacacaatgggaaacggggaaatcaaatgaatttcctaacagctgttgaattctccatagaagaaccctatggcaaagcagtggcattgcttgacttgagatctagacatgt

SEQ ID NO: 6871 - DNA, 253 bp, Glycine max
  Clone ID: 701099124H1
tggtgatggatgggttgaacaatcttcccaaccatttctttttggcttattgcagaaggttgatgctccttcagcatatgtgtgtgctggtagcaggatatatgatgccaccgaatggtatatctgtcagggcatgagatgtccagcgagtactcataagccaagttttcatgtgaacacaaatttaatgtccaagcataattctggcaaaggaactagttcaggtcaaagaggtgggcgtatccaacaccta

SEQ ID NO: 6872 - DNA, 257 bp, Glycine max
  Clone ID: 701099125H1
tgttgtgccctttaatttcgggaggtcattctttcattcttgttagttttagtttcagtcttgagactttcagatccataggccaaatcttaggggtcatgagtttggtgttgatgagtcttggatatctcatatgattgtccaaccaaaccaaacatgaacgaaaagacagcacccttgtaactcaaaggtagcaacttgagacagttttctcaagttcgaacatctaagataacacaaggtccaattggaatccg

SEQ ID NO: 6873 - DNA, 255 bp, Glycine max
  Clone ID: 701099129H1
cgcgcttccgctgccgccgctaccatgtcgggttaccaccacaactcctcctcgagacaacaacaacacatagaccatgaattggccttaacaccacaacgagtgtgtgtctctccacctctgagcaggtacgagtcacagaagcggcgcgattggaacaccttcgggcaatacctgacaaaccaccgaccacctttgactctctcacgctgcagcggcgcgcacgttctggaattcctccgctacctcgaccag

SEQ ID NO: 6874 - DNA, 253 bp, Glycine max
  Clone ID: 701099130H1
ctttcgcttattttattatcgttttcctttctcccgagagttctcctttcccgcttccttctccggccatctttatcctgatggcgtcgtctctgggaattgcttgcggtggaaacaacgccaaattagggatcccaaagcagcggtgtggttcggttcttcagccgccgtgctccctcgctatggggcgctcgacggcgagggtggggaggatcacggcggcgatggccacggccacggcggtgatgaccac

SEQ ID NO: 6875 - DNA, 259 bp, Glycine max
  Clone ID: 701099131H1
ccacaattcacaaccgaaacagtgtccatctctctcacaaaatgacaacaatatcacattgctcccttctcttcctcttcctcttcctgtccaccctccacatagcttccaccctctcaacccccaccaacttcatcaagtcctcctgcagcaccacccagtacccaggcctctgcatccagtccctctccgtctacgcctccaccatccagcaagacccccacgagctcgtccagacagccctctcgctctccctcaa

SEQ ID NO: 6876 - DNA, 194 bp, Glycine max
  Clone ID: 701099132H1
ccgggtactgctttaccggtgtcggcaaaaaatccaaagatcttttgactaaggactacaactccgatcagaaactcaccatttcctcatacagcatctccggagtggccctcacttcaacatctgtcaagaaaggaggactctccactggggatgtggcagcactgtacaagtataagaacactattattgat

SEQ ID NO: 6877 - DNA, 256 bp, Glycine max
  Clone ID: 701099134H1
gcagatcttcgtcaagaccctcaccggaaagaccatcaaccttgaggtggaaagctctgacaccatcgacaacgtcaaggccacgatccaggacaaggaaggaattcgcccggatcagcaacgtctcatcttcgccggaaagcagctcgaggatggccgtaccctcgccgactacaacatccagaaggagtccaacccttcacctcgtccttcgtctccgtggtcgcatgcagatcttcgtcaagactctcactgg

SEQ ID NO: 6878 - DNA, 251 bp, Glycine max
  Clone ID: 701099136H1
gttttctttgaaacgcacagcttcaatcaccgaccacaccacacatcaacgacatgcttcctctttcccttctcaagactgcccaaggccaccctatgtaggtggaactgaaaaatggggagacatataacgggcatttggttaattgcgacacatggatgaacatccatctgcgagaagtcatttgtacatctaaagacggagatagattttggaggatgcctgaatgctacatacgaggcaatacaatc

SEQ ID NO: 6879 - DNA, 93 bp, Glycine max
  Clone ID: 701099139H1
tggatgaacagagggttgcacagtggaattggcgaacgagacgtgcaagtgcgtcattggtcccattaacagtttaccttgttccacacaaca

SEQ ID NO: 6880 - DNA, 250 bp, Glycine max
  Clone ID: 701099140H1
cttttgtttgttcttcagtactttagtgtgtgatttaattccaagattttgagaatgtctagctgtgggtgtggaagtagctgcaactgtggcagcaactgcggttgcaacaagtactcttttgacttgagctatgttgagaagacaaccacagagactcttgctttgggtgttgggtctgtgaaggcccaattggagggtgctgaaatgggtgttgcagctgagaacggtggctgcaactgtggatcaa

SEQ ID NO: 6881 - DNA, 252 bp, Glycine max
  Clone ID: 701099142H1
gttctgttgatgaggagattctgtctccacatgataacattaggtcagagaatgctaaggggatgattgctgtgaagtttgtcatggacgagaacatttccggctttcaaactggtaaggttcaggcagaagggggatcaacagaagggagtggtcctgagagccctgccagtgccaagggaaatgtgaaggatatggcgaagaatatttttaaacatgcagaaaaatcggctcgtggcttgaggcacgttc

SEQ ID NO: 6882 - DNA, 248 bp, Glycine max
  Clone ID: 701099143H1
gtccgtcaaacccttggccctgatcaggccctctgccgccgccgacgtcgccagagtggtgaagcacgcggcggcgtcttctagcctcacggtggcggcgcgcgggaacggccactccatcaacggccaggccatggcggagcagggcctggtcctcgacatgcgcgccatccaggacccgtttgagattctctggatagaaggttctccctacgtcgacgtttcgggaggggcattatgggaagacg

SEQ ID NO: 6883 - DNA, 249 bp, Glycine max
  Clone ID: 701099145H1
ctcgagcgcgcttttggattaaatttggagaggattcgattgcatctattaccgatttgtttcttggaccctctaaagatgaacaagaaagagcaagtgcaaagaaaaaggcagaagaaactatcatggtaatggaagagcaaggcctaggagacaagaagttctttggaggcaacaatattggaatggtggatatagctcatggatgcctgagtcattggttagaaggcttggaggaaattgtgggga

SEQ ID NO: 6884 - DNA, 250 bp, Glycine max
  Clone ID: 701099146H1
caaaattcaactcaataatcccttccctggttcccatcatggacgactagaagaaaccctactcacccaaatcgactgggaatcgttcctcgacgacatacctgcacttaacgtcgatgattttttgcaggacgacaacgccgttcctgttgttaccgacaatcattcctccccgaacgacgaccccgttttgtccgagatcgagaacatgctcatgacgcaggccgaaaacgacgctgtcgttttgccc

SEQ ID NO: 6885 - DNA, 253 bp, Glycine max
  Clone ID: 701099147H1
cgcagtcgcagtgagtgaaaaggaaaaccctaattgcggtattctcagtgccttcgagagacagaaaaaatggcagataatcttgttctccgtggcaccatgcgcgcccacaccgacgttgtgacggcgattgccactcccatcgacaactccgacatgatcgtcaccgcctcacgcgacaaatccatcatcctctggcatcttaccaaggaggacaagacttacggtgtcccccgccgccgcctcaccggcc

SEQ ID NO: 6886 - DNA, 284 bp, Glycine max
  Clone ID: 701099148H1
catacgtaagcacggtcttaattccgaacgaggacagagtaagggtggtgaaaaacgatgaagccaggtgaaatgtttgctcacataggatccatagttgcttccttgatgtttgtttgggccatgtttaagcaatttttcccttatcaactaagcaaccaaattgagaaacactcccaaagattggtgaccttagtctacccttacatccaaatcacattccatgagttcactggtgagagactcatgagaagtgaggcctattctgccatagagaactacct

SEQ ID NO: 6887 - DNA, 264 bp, Glycine max
  Clone ID: 701099149H1
tgagcatggagggttgtgtgaagccgttgctatgccttgttgggtttgtggtgcttgtgagtactattggtggggtcgagagtgctggtgaatgtgggaaatctacaaccccacataatgaggcttataagcttgcaccatgtgcctcagcagcacaagatgagaatgctagtgtttctcagagttgctgtgctcatgtgaagaaaattgggcagaaccctagttgcctctgtgcagttcttctctctaacacagccaaaatgg

SEQ ID NO: 6888 - DNA, 259 bp, Glycine max
  Clone ID: 701099150H1
gcatatggacactttggcagagatgaccctgacttcacatgggaagtggtgaagccactcaagggggagaaggtacctgcttaactaaaaggggttccaacactcttggcaagggacttttgcactactactggcttcttattatctgattgctagaattttctctatgtttccttccctcttactcaattctgtttttcattttctgtatttatttatgaatttcccccttttttttgtgtacttgtaagagtgcttt

SEQ ID NO: 6889 - DNA, 253 bp, Glycine max
  Clone ID: 701099154H1
attgaaatggataaacattcttacaaggaaaaagtgatggagaagcaatctaaatctgatgtcattccgactttgagccagagtcagagttctgcaactaaagtgcattatccaaaccctgattcttctgcggaccttaaatttcctgtcttggatgttaccaatctagaggaactatctcgcttgaatatttccactgctatgaacaagtctaatgcaataacacctgaaggaagaggtcaaaacctggata

SEQ ID NO: 6890 - DNA, 253 bp, Glycine max
  Clone ID: 701099155H1
ctctctctaaccttttccccaaaccaacttacactcaaagaaagcttgttctccttctgcctagtaagaagcaacttgttttagaaagaaaagaaaaacagtgtcattgctctttggcacaataagataatagaaaatggaaagcgacaggaattgggagcagaccgcactcatcagtgagctaattcaggggttggaggtagcaagaaagttgaaggaagacttgagttcagcctcttcggttgacgctagg

SEQ ID NO: 6891 - DNA, 251 bp, Glycine max
  Clone ID: 701099156H1
tggaggtattggaactgtgccagtgggacgtgttgagaccggtgtcttgaagcctggaatggtggtgacttttgcaccaactggactgacaagtgaagtcaagtctgtggagatgcaccatgaatctcttacagatgcacatcctggtgacaatgtgggattcaatgtgaagaatgttgctgttaaggatttgaagcgtggttatgttgcctcaaactcaaaggatgaccctgcaaaggaggctgctaact

SEQ ID NO: 6892 - DNA, 251 bp, Glycine max
  Clone ID: 701099157H1
ctcacaacacaacccctttctcttctcttccaattacaaatcccttcttctctctctctctctttattctcatttcacaactcatcaatcccctctctctctctcccaaacgcaaaacctaagcatggctcagaaggcccagaaaaacgacactgagtttaaggtccccgaacccatcatcaacccctgcaccaccaacaccaccaccaccacctcgatttccgaaccttctagattcttcgatgcgacca

SEQ ID NO: 6893 - DNA, 249 bp, Glycine max
  Clone ID: 701099158H1
tttgagtttgaatttgatttggacgaggttggaggtttgcaatttccttcggttgtgacctgtgaatccgattgtattctgaattagggtttaagctttacacacagagatgggtagcccctcgaagaagaacgaaagtaaggggtttttcgccgccgtgtcttccatgttcaccagcgctgtcaaccgatcggtcaacgggcttagtgtagaagtcataaatccagatggaggtaaagaagattcgga

SEQ ID NO: 6894 - DNA, 251 bp, Glycine max
  Clone ID: 701099162H1
gcgtacaatactagtggctaacacttcaaacatgctagtggctagtcgtgaagcttcaatttatacaggagtcacattagctgagtatttcagagatatgggttataatgtcagtatgatggcagattctacatgtagatgggcacaagcattgcgtgaaatctgtggacgagtggcagaaatgcctgcagatagtggatatcgtgcataccttgctgcacgtttagcctcgttctatgaacgtgctggga

SEQ ID NO: 6895 - DNA, 255 bp, Glycine max
  Clone ID: 701099163H1
cccctcctgtccgccacttctgaatctattgagtcaacaatcatgtcggacgaagacgcaccattacgagtccaaggccgacgccggagcctccaaaacctaccctcagcaagccggtaccatccgcaagaacggctacatcgtcatcaaaggccgcccctgcaaggttgtggaagtttcgacttccaaaactggaaagcacggtcacgctaagtgtcactttgttggaattgatattttcactgccaagaaact

SEQ ID NO: 6896 - DNA, 260 bp, Glycine max
  Clone ID: 701099164H1
ctcgaggcactacataacgctgccatctccagagtcatgtttggagaccaatattccatctctcgttgcgtggttccatccctatccactcttcctctcagagccatgcacaaaggaaaacacgttgagctgaacagaacggttatggtggtaaaggcaaagactaatagtgattttcatgactcagacgttgacatttctttgagccacagagttaatgctgtgaaactttccaaaactctatccatatgtgatcatgc

SEQ ID NO: 6897 - DNA, 262 bp, Glycine max
  Clone ID: 701099165H1
tgaagttcctggtcaaaatgtctatgcatacttttatccaccaactaatcctgatttccaagctagtgaagaagaaaagcctccattattattgaagagccacggtggactaactgctgaaacacgtggaattttaaacttgagtattcagtactggactagtcggggttgggcattcgttgatgttaattatggtggaagcacaggttatggcagggagttccgagaacggcttttgggacgatggggaatagttgatgtc

SEQ ID NO: 6898 - DNA, 253 bp, Glycine max
  Clone ID: 701099166H1
tcgagcttgaggtggaaagctctgacaccatcgacaacgtcaaggccaagatccaggacaaggaaggaatccccccggaccagcaacgtctcattttcgccggaaagcaacttgaggacggccgtacccttgctgactacaacattcagaaggagagtactcttcacctcgtcctccgtctccgtggtggcatgcagatcttcgttaagacactcaccggcaagaccataaccctagaggttgaaagctccga

SEQ ID NO: 6899 - DNA, 252 bp, Glycine max
  Clone ID: 701099169H1
ctcggttcctgcaacggactcctctgtatatccaacgtcgccgacgacatcgccttttggaacccctccctccgccagcaccgtattcttccctctttgcccctcccccgccgccgcctccaccccgacaccactctcttcgccgcccgcgtctacggcttcggcttcgaccatacaagtcccgactacaagctcgtccgcatctcttacttcgtcgacttgcaggaccgctccttcgactcccaggtcaag

SEQ ID NO: 6900 - DNA, 250 bp, Glycine max
  Clone ID: 701099170H1
gtggaggaattgaaattgaagacaactgggataaggttaagactgcatttgttccaacaggagtgtctcttacgtcagaaattgttgccccacttgttgcaacccttcccttggagatcaagggagaaattgaggagtttctcaaagtggttttcactctgtttcaagacctggattttactttcttagagatgaatcctttcacattggttgatggaaagccttatcctttggatatgagaggcgagct

SEQ ID NO: 6901 - DNA, 247 bp, Glycine max
  Clone ID: 701099171H1
gtggccaagtccggggtgacggataagaggtgggcgtgcgggcttgtgattcaggccctgatggtttcggagtcggagtcgagggaatattcaagccggatctcggagagagccgtttcggttgtggaaatgtggaaggagcatttggatggagaatccgcgagtggtgctgccgaagtggtcatgtttctgcagatggtcgtttgtttcggcttgaggtctaggtttgatgatgagtatttgagga

SEQ ID NO: 6902 - DNA, 250 bp, Glycine max
  Clone ID: 701099172H1
gctatgggtacgcattgacccctcgtcatgatcccagcatatatgctgctgcttatggggcttaccccctttatggaggccaccaacaacaagtaagctggacgaagtgcagtacagtgctggagtaccattcacaacaagttagacagtatcgagcttgaatgtgcgagttaagtttgtctgttttaacttgcttgatgtgttgaattcttaagacaagaatccctcctaattgtggagcggagatgaa

SEQ ID NO: 6903 - DNA, 247 bp, Glycine max
  Clone ID: 701099174H1
tttaccagctatacttgttccttttgaaggttagaagtgctacaatacaaacaatggcagctactcaggaagatgtgaagcttttgggtattgtgggaagcccatttgtgtgcagggtccagattgcccttaagttgaagggagttgaatacaaatttttggaagaaaatttgggcaacaagagtgatttgcttctcaaatacaaccctgttcacaagaaggttccagtgtttgttcacaatgagca

SEQ ID NO: 6904 - DNA, 244 bp, Glycine max
  Clone ID: 701099175H1
ctcatttttcttcggatacatggcctgtatatgctacggtttcttcttaatgcttggaactgttggattccgtgctgctttgctctttgtccgccacatttatcgatccattaagtgtgagtaggcattttgtcctctcaagtccactagagcaattgtcttcatttcatagggaattctgtagaaaaattatagtaattttgcagttcttttgtgtactataagggaagctgggttgggtggg

SEQ ID NO: 6905 - DNA, 248 bp, Glycine max
  Clone ID: 701099177H1
agctaattcaatcaaaatgcctcccaaatacaagctagtgctgttgatagcattggttttggttgcaacctcccttgctggtcgcacaaaggaacatcctaagcatcctccatcccttcaagaacaacaacacaccccacaccttgatagctacccgcataaacacataccacctcatcctgtacatggtgccggggaggaaccaacctccattccacgaaagaacggaccaagaaggcccccgaact

SEQ ID NO: 6906 - DNA, 249 bp, Glycine max
  Clone ID: 701099179H1
gtgaaatcgaaaagggctcttcgttgaatttgattgcgtgtcaaatatgttatatgatcatgccgctttgcagtttctgcgctgttcataaaacccttctccgacaacttgtagctgctgctgctgtttctctttcattttttttttgctaaggactcaaggaatacaacatcctgatatttggaggacagattaaagagaaacatcgtggaggaaacaatggcagcaaggtattggtgtcacatgtgc

SEQ ID NO: 6907 - DNA, 249 bp, Glycine max
  Clone ID: 701099180H1
caagcacaagcacaagcacttctctaattccctttcacactctattacagatttcacaagtgcttacacttcaaatggctttggaagcccttcaatcacccaccacagccactccatcgtttagtcccttttatgataccagtctcagttacttagagacaccgtggacgataggaaagcgttctaagcgtagcgcacggagcaacaactgcaacacccttcatgcaccgaggaagagtacctcgctct

SEQ ID NO: 6908 - DNA, 232 bp, Glycine max
  Clone ID: 701099181H1
agccacgagcctcttctctaggataactctgctggagagactccgccaagtccaaggacaacattgcagaattcacgggagaagaaacaagtatctgataaggaagcagaatatgaagcagaagaagcaaaagcagatgcttgattggatctaaatgcccctggtggtgattctgctattgggtgcagtccaatgctggatctgatcacgtgttctgacacagatatgtcaa

SEQ ID NO: 6909 - DNA, 260 bp, Glycine max
  Clone ID: 701099182H1
cacgccaccaagcgcacaacaaagatcatgggtgttaaagttccttcaagcatacttggaattcacccattgcttttcattagacgttttgcagatgtgccagtggcgttttcctccagatgttcctcccccttataagggatacagggatgaggactggcaagacaatgatggagcactaaatacaatatccatgactcatcctcgcctcccaattgaacaccccaactgcttggttgaaaaggaatcagactgccaac

SEQ ID NO: 6910 - DNA, 252 bp, Glycine max
  Clone ID: 701099183H1
ggttgacctccctggtggaggcttccgagcccactgcaaaggtgcttctgaaataattctggctgcttgtgacaaagttctcaactcaaacggtgaggttgtaccccttgatgaagaatcaactaaccatcttaaggatacaataaaccagtttgcaagtcaggcccttagaactctatgccttgcctatgtggaattggaaaacgggttctctactgaagaccctattcctgtttctggatatacatgcat

SEQ ID NO: 6911 - DNA, 253 bp, Glycine max
  Clone ID: 701099184H1
gcctcagactatcaagattaaccaacctgaccaggcaaccagtggtggtcaacctgcgcaaaagtcggcttgctgtggttcatgaaacgaatcagtatctgtagaaagaggtgcacaggtttctgcaatagcactcatctgggtgctaatgttattctgatgacattataagtgggagcatgtatttgtccctctgtatctcccaactgcagatgtcttattttaaagttaatattttaaattctttgctcac

SEQ ID NO: 6912 - DNA, 247 bp, Glycine max
  Clone ID: 701099185H1
tcgagccctaaacaactctttctcttcttccttcgctcgttgttctccctcgcgtagatcgacaatggcggagacagagacgtttgctttccaggctgagatcaaccagctcctcagtctcatcatcaacaccttctactccaacaaggagattttccttcgtgaactcatcagcaacgcctccgatgctttggacaagattcgatttgagagtttgacagataagagcaagctcgatgctcagcca

SEQ ID NO: 6913 - DNA, 251 bp, Glycine max
  Clone ID: 701099186H1
aaaaaaaaaatacactcaaacatggagggctatgagatcctcaaagatattggttctggaaattttgctgtggccaagcttgttagagacaactgcaacaatgagctttttgctgtcaagtttattgagagaggccagaagattgacgagcatgtccagagggaaatcatgaaccacagatcattgaaacaccccaatattattagattcaaagaggttctgttgacaccaactcatttagccatagtaat

SEQ ID NO: 6914 - DNA, 250 bp, Glycine max
  Clone ID: 701099187H1
tgagactgcaaatgctgcaattctccggctcaccaaagagattgcatggtatgaagataatctggcagcagaatcttccatgagaactggcccaccatctacatgtgcagatcgcgtgtttgccaatgagattaacattgctgtccagacaactgaccacccgtacaccaagtagatgtttcgagaagctctcaagactggcttttatggtcttcaggctgctagggatgagtatagattctcatgtggg

SEQ ID NO: 6915 - DNA, 241 bp, Glycine max
  Clone ID: 701099188H1
ctcgagaagagcatgaggatggggaacatgataacaaggctgagagtgaaggtgaagccgaaggaatagctgatgctcatgatgttgaaggtgatggaatgccattgccatattctgaacgctttctactaactgtgaagcctctagcaaagcatgttcctccgatgttacatgagaaggacatgaattcacgagttttctatgggaacgattccctttatgtgctgcttagacttcatca

SEQ ID NO: 6916 - DNA, 245 bp, Glycine max
  Clone ID: 701099189H1
ctctcaccctcctcttcacacattttctgtgcgctctaacaaacattctcgttcacactttcagattgtgtgaagatgggggcgggtggccgaactgatgttcctcctgccaacatgaagtcagaggttgaccctttgaagcgggtgccatttgaaaaactcccatttagtctcagccaaatcaggaaggtcattccacctcactgtttccagcgttctgttttccgctcattctcctatgttgt

SEQ ID NO: 6917 - DNA, 248 bp, Glycine max
  Clone ID: 701099190H1
ggagaacaagaagaaaaaaccgacacaaagatctagtcctagctagaatcaaacaggggcgatctcaccttcaagaacacatcgccatggcaaggaacttgcttcttgtgctttttgcagtagccaccctcctccatggctcagcagcccaaaccagacacatggtcggtgatgccacgggctggatcatccctgctggcggcgctgccacctacaccgcctgggcttccaacaaaaccttcaccgta

SEQ ID NO: 6918 - DNA, 246 bp, Glycine max
  Clone ID: 701099191H1
tagaaacctctcagcccctctccgatcaaatggccaccgtaatcgacggcaaagcgttgcgcaaaccatccgatctgaaatcgccgacgaggtgcgccagtctctcaaaaatacggcaaggttccgggattagcggtggtgatagtagggaacagaaaagattcacagagctatgttggaatgaagagaaaggcatgcgctgaattgggaatcaaatccttcgatgtggaccttcccgaacaagtc

SEQ ID NO: 6919 - DNA, 247 bp, Glycine max
  Clone ID: 701099192H1
tccactcacacctcatcgtttctctctctagatctctgtttcttctttttctccaaccttcgtttcaccaccacacttacattactttgtcgaaatggctccaccaattgagaccccaaacaaggtttccagctatcaacagtccccaaaccctcgtcttaacgagaggattctttcatccatttccaggagacacgttgctgcacacccgtggcacgatcttgagataggacccgaagctccaaag

SEQ ID NO: 6920 - DNA, 247 bp, Glycine max
  Clone ID: 701099193H1
tgcttctaacgtgagatctcagattgcaattgcctcttctcttctcccagaatcggtgtaggttacaggtttaagggttttgttttcatttaggtcactaatccgatatcatgaagctcgatacgactagtctcgaatcgtttcccacactgattgcacctcaaaacgacgtcgccggagaactctccgccgctccgttctttgaccttccgaattccaatgacttcgatgggttcttgaaagacgc

SEQ ID NO: 6921 - DNA, 248 bp, Glycine max
  Clone ID: 701099194H1
ctcgtcttcaatcctttcgttattctcttattcatccttctcttctgaataatccagatctctttctgcccttttctccgtcacgcttttcgtgaccggatctgtatggatttgatccagatctacacgccgatggtggttttggccggatctggtgcgtagaggctcagatctacggtaccgaggtgtgtgattcatgttcgtcttgcttttggaatctgtttcgtagaaagtcgtttggtcttgca

SEQ ID NO: 6922 - DNA, 249 bp, Glycine max
  Clone ID: 701099195H1
aaaacatatatacaacatagttctcttcctagtcttttccttaaattacaacaacttttcaatactcaatctacttaatcatatagcaataataacagctatggataatactccaagattgattcaaacggtttcaagcttggttctgattctaagcatttcatcattggcctcggcatctctgaaagtgggtttctacagctcaacgtgtccctctgccgaggcaatagttaaaagcacggtagaaaa

SEQ ID NO: 6923 - DNA, 272 bp, Glycine max
  Clone ID: 701099201H1
gggcttctttcattcatgatggacaacagtccaaccactggcagtgtaaacaccaccactgctgagaagcagcgtctagcaaaatcttccctttctttcaactgtaagaatgctacattcaggaagatgttccctgagtatgttgagaagtacaaccagcaacagctttctgagcaggctgctccagagagggtctcatcggatacgtctcccgacaagagttcaaggccagttttggaaaagaaattagaatccaatggagaagacatgag

SEQ ID NO: 6924 - DNA, 268 bp, Glycine max
  Clone ID: 701099202H1
atcaagttgttgcacaaatcattatgggtactctcatgcttctcaagaagttcaccctcctctttctcctcatttctggatcacttttatcaacttcctttgcaggtagagtacgatccaactctatcaagaacttcgctaaagatgtgaatgcaatcgaagagggaacaccaaggaaaccactgaataaggaagaagtaagaaccatccatgagaggcttcttagggctaacacaaaagattatggacgatatgatccatccccatc

SEQ ID NO: 6925 - DNA, 257 bp, Glycine max
  Clone ID: 701099203H1
ctcactcaagggttagggatgcgtcggaacagccctgcatactacagttctccgcggcgaggatacggcggtggtggccgaggaggaggaggaggaggaggaggaggagggtccggcaggagggggttcggtggaggcaggcgcagggacagcaatgggagcctcttggttcgtaacattcccctcgattgcagacccgaggagcttcgcgtccctttcgagcgatttggacctgttcgtgacgtttacatacccaa

SEQ ID NO: 6926 - DNA, 264 bp, Glycine max
  Clone ID: 701099204H1
agagtcttttcgggaagcaagagagggttctctccgttttcaatagatctctcactgtcttcttttgagggggaagccggggcctcggcctcggcggctttcaaagcccccaccttcacagccctatcaacaaaaccctaaccctatttttttcttcttcattttctaattcaattttgatcgtcgccgtcactagagatgcctgtcctggcttgttgcgtggatgctgcagcacctcccggctatgcatttgccggtgacatc

SEQ ID NO: 6927 - DNA, 262 bp, Glycine max
  Clone ID: 701099205H1
caagaaccaacaaaaggtgttgttcattgttgtagttgtttgtaactgtagcaacaggaagatggttggaaagttggttgtggtgaggcttgtgttggccatatctgtgttgagctctctccttctgacaacctcggcacagacagcatgcaagggccaggccttcaccgaaaacaaggttttcaccacatgccgtgatcttcctcacctatcctcgtacctccactggacctttgaccaggccacagggaagttggacata

SEQ ID NO: 6928 - DNA, 132 bp, Glycine max
  Clone ID: 701099206H1
ctctttgacacaaggaagaagcctaacaacattaagctctatgtccgccgtgtctttattatggacaactgtgaggagttgattcctgagtatttgggctttgtcaagggtattgttgattctgaagatctc

SEQ ID NO: 6929 - DNA, 262 bp, Glycine max
  Clone ID: 701099207H1
gtttgacagcacagcactcggaaatttctggcgatctctgcgttttcccctattttttctgaatctaacaacaaacattcctctggcaacaatcaatactattaataagagttccttccttcactctcacccaagccaaagaaaggaacaagaacaagaccaacaaagtaacgtgaaagagaaagagatggaggaaattgttccagtggtggatttccagaggctttcagaggaagaggagcgcaagaagctgagaaaaaca

SEQ ID NO: 6930 - DNA, 261 bp, Glycine max
  Clone ID: 701099208H1
ggtgaagtcaaggttggtctcttctggtctgttctgttcttctacgcagacacataacataacacaacgcacctcttcttcttcttctttcccttcaaatttcaacttcttcatccattttgtgctccaaacagcacaaacactgcaatcacaccgtcttcgctttctactcatctaaaagatagaggttcatgggttgctttggcttctgcaaaggagatgatagtgttacagttgctgacagaggacctttcatgcaaa

SEQ ID NO: 6931 - DNA, 258 bp, Glycine max
  Clone ID: 701099209H1
caagaactagctataggcctcaattagttattatattaatttggtctaagtagttgttattacttgtgtagtagttcttctccaatggctgatttaggttcagcctcttccaagagaatgtggtgttccgttccagaaagaatgcagcttcacttggccatgttggccttgcagtttggctatgctggattccatgttgtctcaagagctgcacttaacatgggcgttagaagcttgttttcccagtctatcggaaca

SEQ ID NO: 6932 - DNA, 260 bp, Glycine max
  Clone ID: 701099210H1
agtcgcgttgtgttgcgtcgtgtcgtgcgctgttcctctgtttctcgtttttgtgttcagaccgaaccctagctccgcatcgcaaccatgtcgaccaagcaaggtggaaaagctaagcctttgaagaaacccaagtctgataagaaggattacgacgagattgatgtggctaacattcagaagaaaaaggaagaggagaaggcgctaaaggagttgaaagccaaggcgcaacagaagggaagctttggaggttctgggct

SEQ ID NO: 6933 - DNA, 258 bp, Glycine max
  Clone ID: 701099211H1
cggaacctcaacatgacatgaaaggtaagaagctctggtgaactcaactcactcgtggtaagacagaagaagaatatcgtttcgctcttaccttcttcaccttcattctctctctagagaatggaaccggaatccggaacttccacttctcggaatccttcgcagttgtcatgggtgaatctgtctagaaatctgttattagcgtatcaaagctttggtgtggtgtatggagatctgagcacttcacctctctatgtc

SEQ ID NO: 6934 - DNA, 258 bp, Glycine max
  Clone ID: 701099212H1
cggctcgagaagcaaacgataagaaatgttatcagaaacattggccatccctgcagtactccttgtaatactcattttgattctatcctctgtcttgttccatcttcaagatgaaagaacaaatccaccaggtcctaaacccctcccaattattggtaaccttcacatgctggggaaactcccacatcgttcccttcaagcccttgccaaaaattatggacccataatgttcataaagttgggacaagtcccaaccgt

SEQ ID NO: 6935 - DNA, 258 bp, Glycine max
  Clone ID: 701099213H1
gcttagattgatttgtgaatttcgcaaagtgtagaatagcaccagctcgataagctagagattgagctagcccaccgagcaaaccttcagagttataactagctagctaattaagccagtagcacccctaccaagcgacacattcatagcttctctttaggtttgtattcaacaaaatccatggctaagttagaggctattataaataaactcaggcgagtaaccagaatttattttagagactagctatagcaaggc

SEQ ID NO: 6936 - DNA, 257 bp, Glycine max
  Clone ID: 701099214H1
caaagtttgggattgtcaaaatggaaaatggtaatgtgatagtgaacggttcccctgaatatgttcggtcctgttgcgagggtagcctccaacgccttggtgtcagctacattgatctctattatcagcaccgtgttgacacaactgtacccattgaagacaccatgggagagcttaaaaggctggtccaagagggaaaaataaggtacataggattgtcggaagctagccctgacacaattaggagggcacatgct

SEQ ID NO: 6937 - DNA, 255 bp, Glycine max
  Clone ID: 701099215H1
ctcgagcgctcgagccgcttcttcttattctttctttttctccttctaattctttgctaccctttccctattacaaggcactcacactaacccaataaacatggacctagcacatgttttccttgtgtgcttcgttcctcttcattgtcctcttcagggcactcatcaaaccttattatgtctccaaacgccgtgacttgccactcccacctggctccatgggttggccttacataggagaaacctttcaaatgt

SEQ ID NO: 6938 - DNA, 258 bp, Glycine max
  Clone ID: 701099216H1
ctcgagcgcgcgaatggcgaacacagaaggcgtcactagcctttggagaggctcatcgcttacggtgaaccgcgccatgctcgtgacggcgtcgcagctcgcgtcgtacgaccagttcaaagaaacgatcttggagaacggcatgatgcgcgacgggctcgggacccatgtcacggcgagcttcgcggcggggttcgtggcggcggtggcgtcgaaccccgtcgacgtgatcaagacgagggtgatgaacatgagggt

SEQ ID NO: 6939 - DNA, 267 bp, Glycine max
  Clone ID: 701099217H1
caatttaccagctatacttgttccttttgaaggttagaagtgctacaatacaaacaatggcagctactcaggaagatgtgaagcttttgggtattgtgggaagcccatttgtgtgcagggtccagattgcccttaagttgaagggagttgaatacaaatttttggaagaaaatttgggcaacaagagtgatttgcttctcaaatacaaccctgttcacaagaaggttccagtgtttgttcacaatgagcagcccatagcagagtctc

SEQ ID NO: 6940 - DNA, 262 bp, Glycine max
  Clone ID: 701099218H1
ggagcagaggaaaagcgtgtggtgtcttcttctccggtggatcctcaggcctgtaatttgggattagccactcatgaatcaaaatcaatccattaaatcaaaatacctttctcactgttaactcatcaacaatacctaatttttttggttctttttttcacacttacacatatccactttctcttcctcgtacatataaaaggaagaagcaaagcatctttttcttttttcagtattcacgcctctgcccgcttaattttac

SEQ ID NO: 6941 - DNA, 256 bp, Glycine max
  Clone ID: 701099219H1
ctctcttcttcacttcctctttactattcgttcgttctggattcagttgaggaaaaaaaactgcgtggtttgagcaatggatgttaaagctgcacagaggttacaactttcagcggtggttcaacccgaaaggtttgggagaagaccaccattcagtacatgtcgtttgggtgtgtctcgggaaccgcagagccttcgggtttttgtttcgccaatgatgatgcggcgcagaacaaccgctttggaggtttcctct

SEQ ID NO: 6942 - DNA, 258 bp, Glycine max
  Clone ID: 701099220H1
ggaggatggaaagaaagtgaataaccttctggaaatgaatagaggggaaggagtccatgatggtttttctggacctggaccaaatgattcgcttcttcctggtcttattgatgatgttgccttgaattgtcttgcttggcttagtggatccgattatgccgcactatcgtgtatcaataaaaagttcaataaactgatcaatagtgggtatctatatgggttgaggaaacaattgggggctgtggagcatttggtgta

SEQ ID NO: 6943 - DNA, 261 bp, Glycine max
  Clone ID: 701099221H1
gaagatcctctgtcaaaaagatccaaaacccttttcttatccattgttttgtttcctttcatcactcaaatcttagaccaactctgccatatcgagtcttttatgtgcttttacagctaagtctgttgctgaaaattggcacaactcgaagctcccaagtgcatgcagctcaggttcaaggtacatagaaccaacacgccatcagtattctctgaacttgcatgacagctacttgcttttctcatcccaaggtacatacta

SEQ ID NO: 6944 - DNA, 254 bp, Glycine max
  Clone ID: 701099223H1
ctaaatcataacttgaacttatgtgatgaattagttgttccaggccttgctggaacaatgaatcgaaggagtgcagaaggaaggatttggaagtaccgaaatggtaccttttggatttggattcctttcggacaattttgtcatagacatgaaacatattgtccacaatggttgtattgtggatactgtaaattcttctgctaattgattccctcctgcatttttaatccatggataactcatatagccagatg

SEQ ID NO: 6945 - DNA, 255 bp, Glycine max
  Clone ID: 701099224H1
ctttcttcctttgtaatagaaagcacgcgtttctctctctccctctctcaacgaatatttgtgtacttcctcttttgtgggtagattcaatttaccatgtcgagttcatcggaatactctcaattttccggccagaaaccggcgaggtcgccggagaaatcgagcttctctcagacttgtagcctgttgagtcaatacatcaaggagaagggtagcttcggagatcttaccctcggaatgacatcatgtgggtca

SEQ ID NO: 6946 - DNA, 256 bp, Glycine max
  Clone ID: 701099225H1
gctagatacacaagcctacggtgatcatacctgtataataacaaaacaacatttggaacctaacttgggtgggctcactgttgagcaggctatccagagcaagaagctgttcatcttagatcaccatgactatctcattccatatttgaggaaaataaatgcaactaccacaaagacttatgctaccagaaccatatttttcttgaaaagtgatggaactttgacgccattggccattgagttaagtaagccgcat

SEQ ID NO: 6947 - DNA, 180 bp, Glycine max
  Clone ID: 701099226H1
ttggacttgagacatacatgcaactagaactacattatagagtttagtttgaactgtttgtgattaggtgacctgtcaatcaaccctcttgtttatgttgggtttttatgataaaaaccagattttggatatccaatttttttttcactctaattttcaaaatgaattccttttgaattg

SEQ ID NO: 6948 - DNA, 270 bp, Glycine max
  Clone ID: 701099227H1
gccactgctaggtgacagcacatcatctggaaggtcgaagatttctgcataaacagcgaatgggtgaaaccaatttggttacaggagtccaagaggaagaccaggagggcatttattgggaaaccccagagcacttagaaggttgaggactgcttgtaagagggccaagagaacactttcatggactgctcagaccaccattgaaattgattctctatacgagggaattgatttctactccactgttactcgtgccagatttgaggagct

SEQ ID NO: 6949 - DNA, 256 bp, Glycine max
  Clone ID: 701099228H1
gctgcactctcttttatccctcaaaaaccaaaaccctaatggcagatcgcggaggtggcgaccgtggcagcgaccgtggcggtttcggacgcggctttggtgggcgagggcgcggaggtgacaggggccgaggccggcgccgaggtccccgccgcgaggaagaggagaaatgggtcccagtgaccaaactgggccgcctggtgaaggagggaagaatccgaagccttgaacagatctacctccactcgctcccgat

SEQ ID NO: 6950 - DNA, 254 bp, Glycine max
  Clone ID: 701099229H1
cctttctccttctaacgagtgaggaaaaatggcgcgtaagaagatcagagagtatgactcacagaggttgttgaaggagcactttaagagactctctggcaaggagttgccgatcaagtctgcacaaattaccgcaccaactgattccactgagctacaacagcaggaaccctggctttcatcttctaaattggttgttaaacctgacatgttatttggaaagcgtggcaaaagtggtttggctgccttgaatt

SEQ ID NO: 6951 - DNA, 256 bp, Glycine max
  Clone ID: 701099231H1
gaagcctccaggtttccttcttctaaaggaagtaaatatataataaatcagcaggaggaaatatctcaacagcatgctaatggcaatagcttggcagataaattagggttttccaattcaagctacagggaggacccatcttctggaagctttttgaatgctctggcaaagccttgggagaggccaattgggagtgctgaccagcgtattaacagtggtcaagagggccttacttatgatgacaactctagacatg

SEQ ID NO: 6952 - DNA, 203 bp, Glycine max
  Clone ID: 701099232H1
ttgaactctttcaactaatgtgtcgatttagccaatttcaacgtttgaatttttcaggcattcattcattagtttcataatctcggacattcaacaagggtttgattcgtagtgtgagtatggtgggttttgctggaagatttgtatcacagtatatctgtacatgcaaataattctgcggtgtacctctactatcagtcact

SEQ ID NO: 6953 - DNA, 267 bp, Glycine max
  Clone ID: 701099233H1
ctttatccaataataataactccattttccctctgtcttccccccctcctctacacaaaaatatattattagcatggagaaggtgaattttgtgaagaatggagagcttagattgcctccggggttccgtttccacccgactgatgaggagctggttctgcaatacttgaagcgcaaggtcttctcctgccctttgccagcctctatcattcctgagcttcatgtttgcaagtctgatccttgggatttgccaggtgatttggagca

SEQ ID NO: 6954 - DNA, 263 bp, Glycine max
  Clone ID: 701099234H1
attacactaatcaccatgaacagatttcatagtaaaagacaactcttgatcttcctggtggtaatcccaagcctagtcgctgccgagtgcacgtgcgatgaagaagaccaagagcgagacaaatcaaaagctttaaggtacaaaatagcagctttaatatcaatactagttgctagtgcaatcggggtgtgtattccacttcttggcaaagttatacccgccttgagccctgagaagaacatattcttcatcattaaggcctt

SEQ ID NO: 6955 - DNA, 256 bp, Glycine max
  Clone ID: 701099236H1
cgtttctctctctagatctctgtttcttctttttctccaaccttcgtttcaccaccacacttacattacttcgtcgaaatggctccaccaattgagaccccaaacaaggtttccagctatcaacagtccccaaaccctcgtcttaacgagaggattctttcatccatttccaggagacacgttgctgcacacccgtggcacgatcttgagataggacccgaagctccaaaagattccaactgtgtggccgaaatag

SEQ ID NO: 6956 - DNA, 260 bp, Glycine max
  Clone ID: 701099237H1
aaaatgatgctcagaatcaagagggttcccactgtcgtttccaactaccaaaaagaccacgctgcagactctcctcgtcccgtcggaggttgtggtcggaattgcctcaaagcttgttgccttccagatgcaaagctgcctttgtatgctttcaagaaggctaatggaaaggatttggccctgcatgcatgcgccggggagcctcccctcacattcctcgactcacttcttcttggagagtgggaagatcgcatgcagag

SEQ ID NO: 6957 - DNA, 257 bp, Glycine max
  Clone ID: 701099239H1
caaggatagtagcccgcccgcacctttaggaaacaaactatttcggagaaaaatattgttgtaaccttaaaaatgttgtaagcagatgcttttattttcgttgatcacaacttatgctgacattctcaggttcagcacatagataggccattaccataattatttttgtggtgtagggcttttaccttgttatttgaaaggttggttgaattttagcttcctacacggtaacattgaaccaccatgtaatgtaactc

SEQ ID NO: 6958 - DNA, 257 bp, Glycine max
  Clone ID: 701099240H1
attccttctctctctctctctctcccctccgccatggctgaggataaggagatgtctacctctgtcatcaatgggaatgattccctaactggacacatcatatctacaactattcggaggcaaaaatggggaacccaaacagactattagttacatggcagaacgggttgtaggaactggatcatttggaattgttttccaggcaaaatgcttggaaactggggaggcagtggcaattaaaaaggttttacaagaca

SEQ ID NO: 6959 - DNA, 257 bp, Glycine max
  Clone ID: 701099241H1
gttccctgttatttgcaggtgtctaaggagggaacttcaccatttacatatattattgtggacaaccaaacgaagacccgcacttgtatacataccgcaggatatcctccaatgataccagacgaactgtcaaaatcaagtttattatctgccttggatggagcaaaatttgcttattttgatgggaggttgcctgatactgctctagttgttgcccaagagtgcaggcagttagaaagaatatacccatcttaata

SEQ ID NO: 6960 - DNA, 183 bp, Glycine max
  Clone ID: 701099242H1
ctcgagcgcaaatccacttctccaactaatgggcgtgttcagcgaagatccgaatcccaacccgaacccgatcgtgatccgagaggtttgggcctccaatctcgaatccgaattcgaactcatccgcgaactcatcgatcgctacccttttatctcaatggacacagaatttcccggtgttat

SEQ ID NO: 6961 - DNA, 254 bp, Glycine max
  Clone ID: 701099243H1
gggtaacttaccaaccctaaggagttgttgagtttggtacatgggcggagaagtgttgacgatggcggacgtcacggccaacttgcaagcagcaaccaccgcatccaccccttacgcgcttcccaccaatctccctctcctctccgcttttctctccttcgctctcgctcagttcctcaagatcttcacctcctggtataaggagaagagatgggattctaaaaggttgcttgattcgggtggaatgccttcgt

SEQ ID NO: 6962 - DNA, 251 bp, Glycine max
  Clone ID: 701099244H1
cacgacttgttcaccgatcagagctgattttcgcggctgttaccggtcaccggagattctatccgaaatcgttttccgatgacgataaaaactgttaaagtcagtaacgtttccttgggagcaactgagcaagacattaaggagttcttttcattttctggtgatattgaatatgttgaactacggagccatgatgaacgatctcaaattgcttatattaccttcaaggattcacagggagctgagactgc

SEQ ID NO: 6963 - DNA, 255 bp, Glycine max
  Clone ID: 701099245H1
ggacggccgcaccctcgccgactacaacatccagaaggaatcaacccttcacctcgtcctccgtctccgtggtggcatgcagatcttcgttaagaccctcaccggcaagactattaccctagaagtcgaaagctccgacaccatcgacaacgtcaaggctaagattcaggacaaggagggaatccccccagaccagcagaggctgatcttcgccgggaagcagctcgaggacggacgcacccttgctgactacaa

SEQ ID NO: 6964 - DNA, 256 bp, Glycine max
  Clone ID: 701099247H1
ctaaaccttcttcaataagaataataatattctctctttgttcctctctctaaaattaatggctgaagcacaaagtggccaagctagtgaagggattaaactgtttggaacaacgattacgttgcatggaagagaaagaaaagaagatagaaatgatagtgaagatgggacagaggagataaagagacctgataagatcataccatgcccaagatgcaagagcatggaaaccaagttttgctacttcaataactac

SEQ ID NO: 6965 - DNA, 255 bp, Glycine max
  Clone ID: 701099248H1
ggccttctttgaggaaccaattatgctagttgcatttgtcttgttaggaaggactctcgaacagagagctacgattaaggcagccagtgatatgacaggacttcttagtttattgccaccaaaagctcgccttcttttgaacaatggggaaacagaggttggctcggttgttgaagttccttctgacagtctttctgttggagaccaaattattgtattacctggagatcgtatttccagctgatggagttgtga

SEQ ID NO: 6966 - DNA, 265 bp, Glycine max
  Clone ID: 701099249H1
cggctcgagcggctcgaggaatgaaggaggagttggtggttgaagaagggtaccttttcaaagaagagactcacttcacagtgctcaaaacctctctcttcttcaacggtgatggcttcgctgtctacgattgcaaaggccaactcgttttccgcttcgactcctacggtccccgcgcgcgtgacaaggacgagctcgttctcatggatccccatggccgttctcttctcactctccgccgaaagaaaccgagtcttcatcaacg

SEQ ID NO: 6967 - DNA, 261 bp, Glycine max
  Clone ID: 701099250H1
gcggattctcagaatccaaagccttgacccaacgagttgagctcttcaaaacctacggaagcacccttgccggcttaagagcacaaggcctcgatatcactgcagaggactaccacggtttcgtgcacggaaggctaccttacgactccatcgacactgatcatcagttaccgaacctcctcttgagcatcaaacaaagaaaaattgtttttactaattctgacaggattcacgcgatgagggcgctggataggcttgggg

SEQ ID NO: 6968 - DNA, 183 bp, Glycine max
  Clone ID: 701099252H1
gctccgtctcaattggataccttccactgtcttttcctttgtccaaaagttatcccaggagattgcttctacaatatcagttgcaatgcgtgcaccagcattacttgcgcagtgcttacctggcctagtgcctcatgatcgtggaagtctcagcatatcgtccgttcctgagaaagattttca

SEQ ID NO: 6969 - DNA, 254 bp, Glycine max
  Clone ID: 701099255H1
ccaccatttttctatccccttacttttctccaccgtggtctagcccctctttctcttcaccgctccagttctgagatggaaagagaagtaaaatagaaaatcacaaccattacttaacaagataataatatgtttgacggtgtacatttttgtgggatacctaattgactctcctaccctaaccagagtcacctttcctcgttacttcttctatctgccctagtctctgttctcacatacatctgattagcctt

SEQ ID NO: 6970 - DNA, 201 bp, Glycine max
  Clone ID: 701099256H1
cttttgtgtggggaattatggtaattgattttgagggtttgactactcatggattatgatggtatgagaaaaccttccaaaaacttatttcactctcgcttcttcctttttgggttctattgctgggattgggagttcttgaccgctctcctccttttaagttcttcccctaaatcttctttctccaaatttttaaccccc

SEQ ID NO: 6971 - DNA, 254 bp, Glycine max
  Clone ID: 701099257H1
ctgcaattacgatggcgcccagggacaagactagtgccgttaagcctagcggtaacgccggggtgaaggacctgcattttcgtggagtcaggaagagaccgtgggggacgttcgccgccgagatcagagatcccgccaagaagacccgcgtctggctcggaaccttcgacaccgcggaggaggcggcccgtgcctacgacgccgccgcgcgggagtttcgcggccctaaggcgaagacaaacttccctctccct

SEQ ID NO: 6972 - DNA, 141 bp, Glycine max
  Clone ID: 701099259H1
atcgcagacagacacagagagtgagagagggagatggggagcgacaggagcgcagagaagtcggtgcagaaagagaaggagaagaagaagatgttggccctggctcccattgctaaacctcttgctgggaagaagctttgc

SEQ ID NO: 6973 - DNA, 253 bp, Glycine max
  Clone ID: 701099260H1
ctcagttctcaaccttcactcaaaccctccaagcaaagaacccttcagtgaagacccttttgtccataggcggcggtttcggtccttctttggctgcaaatttctccagaatggcaagacaagccaacaccagaaaatcattcatagactcttcgatccaacaagccagatcgaacaacttcctcggacttgacctagattgggagtacccttcctcggacacagacaagaccaactttgcatcactcatcaa

SEQ ID NO: 6974 - DNA, 253 bp, Glycine max
  Clone ID: 701099261H1
cttggagaaggaaaagaaggagagaagcttagcattgactgagaaccaaccattacctcagttgtgtagcagtaccgacattcgtcccttaaagatggaagattttatatatgcacatgagcaggtttgtgttagtgtatcatcggagtcaacaaacatgaatgaactactccaatggaacgacctttacggagaaggtggatcaagaaaaatgagatctttgagctatttcatgtaaagcttcctgtatagc

SEQ ID NO: 6975 - DNA, 252 bp, Glycine max
  Clone ID: 701099262H1
cgccaagcgaacacttgactcggccacccaattcatatggaggatctttcagcaaaacaacccttctgacagaaaaaatgtgcagaaggtaagcttattcgttgatgacatggatggtgttgcatatactagcaacaatcaaatccatctcagtgcaagatacgttggaaacaataaaggggacgtgaaaacagagataacaggtgtgctgtaccatgaaatggtgcacgtttggcagtggagtgggaatgg

SEQ ID NO: 6976 - DNA, 254 bp, Glycine max
  Clone ID: 701099263H1
ccagcaccgcctccaggccttaatcgagggcgcccgagagacctggacctacgccatcttctggcagtcctcttacgactattccggctccactctcctcggttggggcgacggttactacaaaggcgacgacgacaaagccaaggcaaaggccaagtccaaagccacctccgccgccgagcaggaccaccgcaaaaaggttctccgggaacttaactccctcatctccggctcctcctccgcttccgcctccg

SEQ ID NO: 6977 - DNA, 257 bp, Glycine max
  Clone ID: 701099264H1
tagaaacattatagaatacccaatgtttgtgcctgcaaccaacttaagaaacgttgttcggaatccagctagaacttcaaataatgcaaatttaagtattccaggaaatgttggttcttcatcgcggacaggctcaaatccagctgtcaatccaccacctgcttcggcgtgggtttctcgccctaatcctcagcagtatccgcgcagattatctgaatatgttcgtcggtccttgttttctcctggtttggaagctg

SEQ ID NO: 6978 - DNA, 154 bp, Glycine max
  Clone ID: 701099265H1
ttcaattgagatgggtacttaaaggggattaatttcttcttttgcttctacattaagatcaacagtcgtttgactcaattggaatcttgtatatttggggtcatggataactcaaatgattcatcatcatccttgagttttgtatcatctcgac

SEQ ID NO: 6979 - DNA, 259 bp, Glycine max
  Clone ID: 701099266H1
gagagaagagcggaagagaaaatgacgaccaggttcaagaagaacaggaagaagagaggtcacgtcagcgccggacacggccgtatcggaaagcaccgcaagcatcccggaggtcgcggtaacgccggtggcatgcatcaccaccgtatcctcttcgacaagtaccatcctggtttcttcgggaaggtaggcatgcgctacttccacaaacttcgcaacaaattctacaatccgatcatcaacatcgacaagctgtggt

SEQ ID NO: 6980 - DNA, 247 bp, Glycine max
  unsure at all n locations
  Clone ID: 701099268H1
tcaaattggtctcttgtcttcctcctcatctctacactactccacatatccnncagcctctcaagcccaagcccaagcccaagcccaagcccgttcataaaatcctcctgcagaagcacccagtacccagccctctgcgtctcatccttttcgtctaggcctcaagcatccaacaggaccctcaccaattggttaagcaagaattctccctttccttgaacggcacccaagccacaaaaccttcgtg

SEQ ID NO: 6981 - DNA, 252 bp, Glycine max
  Clone ID: 701099270H1
tagaaaccgatgctgccacactcattcttcttcttcttcagcttttaccactctctatgagaactcttctttcttgatgctatgttgatgactggataaaatctgagacagaagggtagtttctagaaacttgacagagctaattaagagaatcttggtatttatagctgtttttcaatctttgcttacaggaagtagattactttattaactgggtaataagtcgttgtttggaggctatagatggcgatg

SEQ ID NO: 6982 - DNA, 239 bp, Glycine max
  Clone ID: 701099274H1
ctcgagcggtttttgcctctgttatggcgacacttggactgcagataatcttggagtctacccgcacattaatatcttctgaaaatgcattcaacttgaccaaggaacaagagcgctgggttgtgggcattatgctttcagtgactttggtgaaattcctgctgatgatttactgtcgttcttttaccaatgagataattaaagcctatgcccaggatcacttttttgatgtgatcact

SEQ ID NO: 6983 - DNA, 81 bp, Glycine max
  Clone ID: 701099275H1
tgaattcggacacgacttcctattggtgctacagctgcacgcgcttcgttcacatacaagaaccagacgaacgtccgtttg

SEQ ID NO: 6984 - DNA, 250 bp, Glycine max
  Clone ID: 701099276H1
gcgactcagcccctggatacagcctcttcaaggatgcagacaagtgaatttggaaagtctaaagggctactgaagacccttacagaaggaacctggagtgatgcatttgatggcctcggtatttccttgctgctgacatcaaaccctgcaattcagtatacggtgtttgatcagctgaagcaacgagcactgaagaataaacaaaacaatgctgataaaggaacatctccagcatccctttccgcattta

SEQ ID NO: 6985 - DNA, 250 bp, Glycine max
  Clone ID: 701099277H1
gcgggcagccccaaaaccaaggaaatcgtgaaccagttcgcttcagaccagaaactgttttttaagaaattttccgatgcttttgtgaaggtgagccagctagatgtgataacggatcgtattgggaaaggggagattcgtgataagtgctttgttgcaaataagagaagatcttctatggcgtctgtggtggaagaagtagtggaattggctcaggagatataattgtattgggtccttttgctcaggg

SEQ ID NO: 6986 - DNA, 251 bp, Glycine max
  Clone ID: 701099279H1
tcgaaatcggaagaaggattagggtttgtggagatgcaagggcaaggcgttgatgaagtgagcatagaagagttggcgtcgaatctttccctctacaaagatcaactgaaccaggttagagaactcttaaacgatgaccctgcaaattctgaatatgttgacatggagagggaactttccgaggtcattgccttgaccgaggaactccttgcaactgcaaagcagaatgaaatctctgctcctcctaataa

SEQ ID NO: 6987 - DNA, 258 bp, Glycine max
  Clone ID: 701099281H1
gcggcggcaacagggagagaagatgaagttcaatccacgtgtgtcgagcagccgccgcaagagccgaaaggtcatttcacggcgccgtcgagcgtgcggcgggtgcttatgagcgcacctctgtcggcggactgcggtccaagtacaacgtgaggtcgatcccagtacggaaggaggacgaggtgcaggtggtgcgaggaacatacaagggtcgcgaggggaaggtgactcaggtctaccgtcgaaagtgggtgattc

SEQ ID NO: 6988 - DNA, 254 bp, Glycine max
  Clone ID: 701099282H1
tctatatccaatctgcatcatccagaatctagtttctttctttctttgtcatctcaggttattcaccagtttgagttttccaatctcctccactgtttcttctcctgatcctgttcagaatccaaggagcttgggaacaaactcctgctccttcttcaccctgttaccagaggcaccacttctggtttattgataggcaatgggacgtgcaatgggaaagattgaatcacccaaaaagggatcagtgccagaaa

SEQ ID NO: 6989 - DNA, 244 bp, Glycine max
  Clone ID: 701099283H1
cgttcgcaaccaccggccatactcactgttgttctcaagggattcgattctctctgcactcacttctagggttttctctgcgctataagcaatcatggcggatgaaacaccaaatgagatgaaggaggaggttccagaaattgttccttttgatcctaccaagaagaagaagaagaagaaaattacaattgtagatcctgctgatgaacctgtggagaaattggctgagaagacagaaaacctc

SEQ ID NO: 6990 - DNA, 255 bp, Glycine max
  Clone ID: 701099284H1
gttcctctcgcccagaatccgagatcaaccccgacgaaggcaaggcctttttctcggcttcttcagatttctgaaatggcgcctgtttcagctttagccaagtacaagctcgtcttcctgggtgaccaatccgtgggcaaaaccagcatcatcactcgcttcatgtatgataaattcgataacacctatcaggctacaattggtattgattttctatcaaaaactatgtatcttgaagatcgaactgttcgactg

SEQ ID NO: 6991 - DNA, 232 bp, Glycine max
  Clone ID: 701099285H1
gtcaaatggcggcgagtagaagcatttttactctgatgaaatacttgagagtgcgcgtcgaagctcttccccgaaacactccctttaccctcgctccaaacttttctgattcgccgcttctgtgaagaggttaggggttattttctcgacaagtctgacgtcacagatcgcgtcatttcctgggtaaaaaacttccagaaagttgatccttcaaaggttaaccctaatgatc

SEQ ID NO: 6992 - DNA, 252 bp, Glycine max
  Clone ID: 701099286H1
gaaagaccaaggcatatgcaggtggaatcatgccttaagatcagctcaacaccatctcaaaaaccatgttggctcattctctcaggctaacaagctttcttcttctgctatgatatccacaacactaaaacatgagaaggcaaatcaatcagaagagtctttgagaactgtcatgtacttaagctgctggggtcccaactagatatcataagcccaacaacaaaatattcttttctcttttcaatcctagga

SEQ ID NO: 6993 - DNA, 159 bp, Glycine max
  Clone ID: 701099287H1
aagaaagatgtaatctttcctctatgatatcagggactctagttttactgggaaaattgatgctcatttgtaccatatagcataattgagaagttgtgcgaggatttgatgaactcatggttataaaatgatggttttcttaaataaatagtgttgtgt

SEQ ID NO: 6994 - DNA, 250 bp, Glycine max
  Clone ID: 701099289H1
agaaaagagaattagggtcacgagggtttcatcctgcggcatcagacatgggaggaggcaatgggcaaaaggcaaagatggctcgcgagaagaacatcgagaagcagaaggccgcctcaaagggaagccagctggattcaaacaagaaagcaatgtcgatccagtgcaaggtgtgcatgcaaacatttatgtgcaacacatcgggagtgcagtgtagggagcatgctgaagccaaacaccctaaatctga

SEQ ID NO: 6995 - DNA, 173 bp, Glycine max
  Clone ID: 701099291H1
aaaaatgtttggtttgcagtattttttacattacgttcttcctatcagcccaaaagaacgtaatgtaaaaattacaattttataaatatttaggtaaagaaaccacttgcaagtaggtttgttgtgctaatgataaccaagtaatgattgacgagcgtacagctgttgtcctt

SEQ ID NO: 6996 - DNA, 248 bp, Glycine max
  Clone ID: 701099292H1
gcccttgctggcacagtggacattgactttgacactgaacccattgggatagggaaggatggaacagagatctccttcaaggatatttggccatccagtgaagaaatagcaaatgttgtacaatcaagtgtgctgcctgatatgtttagggacacatataatgcaatcacccaagggaatcccatgtggaataatttatctgttccaacgggcactctttatgcttgggaccctacatcgacttatat

SEQ ID NO: 6997 - DNA, 247 bp, Glycine max
  Clone ID: 701099293H1
cgagaacccaatgttgtcctcgtctgtgtctggcgaatcttcttcgcctgaatctggtgttactttcttggatttctcggacttctcggattctaataatcagtgggatgaaatggagaattttgggttggagaagttcccttctgtggagattgattgggcggcaatatgactcgctgaattttcgttacgtcaaatggttggtttggctttgctctgcttttgggtttagtatgtatctactact

SEQ ID NO: 6998 - DNA, 250 bp, Glycine max
  Clone ID: 701099295H1
aattcctcttctttttttctttttctctgagtctcagccatatccatcatctttctctctccgccgcatgcgggggtgacgtttgatacccttcttcttatacagatccgccgccccttcttcctcccaacgccgctttctgctgtggacccggtttatgacgattccttggcaaacaacaaacgcatattgaagaatttgtggtttcacgattttacccctcgaaatcagaagtatcagtagcgtctac

SEQ ID NO: 6999 - DNA, 271 bp, Glycine max
  Clone ID: 701099301H1
gcttaacgttgttggaactactaaggtaacgcaagctgttcttcccgggatgctgaagagaaagaagggtgcgattgttaacatgggttctggagctgctattgttattccttcggatcctctttatgctgtttatgctgccaccaaagcgtacatcgatcagttttcgagatgtctctatgttgaatacaagaggagtggaattgacgttcagtgtcaggttccattatatgtggcaaccaagatggcatcaatcaggaaatcttcattc

SEQ ID NO: 7000 - DNA, 252 bp, Glycine max
  Clone ID: 701099302H1
cttcgtctcagatctctctttctctctctctagggtttccgcttctctctctgctttttatgatcactctctgacgcgcttctgtcaccaaatcaagtgcttccgtctcttccccttcttctctgattggaaggattcgtgtggtcggagatggtggtttcggggccaatcacgccggggcaggtgtctttcttgctgggggttattccagtttttgtttcatggatatattcagagtacttagagtacaag

SEQ ID NO: 7001 - DNA, 270 bp, Glycine max
  Clone ID: 701099303H1
cagagggagtagcggcattaaaaatgcagatcttcgtgaaaactctgacagggaagactataaccctcgaggtcgagagcagcgacaccatcgacaatgtcaaggccaagattcaagacaaggaaggtactacacataaattccaaactccattcaacgaatcgcgttttcaattttccataacctaaaaaatctctcgtttgaatttttcaggcattcctccggatcagcagcgtttgattttcgccggaaagcagcttgaagatggac

SEQ ID NO: 7002 - DNA, 217 bp, Glycine max
  Clone ID: 701099304H1
ctggaacgtggtggtcttggttggcggttatgcccaagaagcatcagatcagcaatggcaacctcttctttcttcttcaccttgctattactgcttctcactgtttcagatttgtttgtgcaaagccgtggccttaattttggaatcaactacgggcaaatagccaacaaccttccatctccatctcgtgtggctgttctaataaaatctctgaatg

SEQ ID NO: 7003 - DNA, 270 bp, Glycine max
  Clone ID: 701099305H1
caattccctaaacatttttcttttccttcgaactccaattccctcaccagaacacggtcaccattgttttccctttcaacaacattcgccatcctttcgcgacgaagagaaaaaaaaatggggtgttagggtttcgattctctgcgacgctctccgcattgcgctaccctgcaccttcctcaccatatcgcgcgcctctctcactcccctactgtttttccgctccccaccccctctctctgtgttgcgaaaattagggttcataggttt

SEQ ID NO: 7004 - DNA, 270 bp, Glycine max
  Clone ID: 701099306H1
cattttctgggtgtgtcgaacgagggctcagcttaaagtttgttccttttttctcaatcgttttccctcacggcacattcttcttcttcttcttcttccaaaaaacaggaacattgatcctccgattaagaaaaagacattgtctcgtgctagcttgagtcctcagaggaaagacaagtgcatagtttttccccttgtgaggtataatgaattccgggagcctgtttgccaggcttgtaatgtggttatgttggagtctatacgtgcaca

SEQ ID NO: 7005 - DNA, 211 bp, Glycine max
  Clone ID: 701099307H1
cctattgttactttctctttttgtttttttataataaaaagattcagttttgtgtgttgtcgctgatatccatttgcattttgtattctgggtcaatgctgttcatgttctctgcaaattagggtttcaatccgtgctccggagtgattgattctgtttcatgtgctgaaaaggaatgtagctggaaaagattgtgtttgttctgaataaa

SEQ ID NO: 7006 - DNA, 274 bp, Glycine max
  Clone ID: 701099308H1
attgaaccttcgaagagcaccatggaccctgacgtcatcgagattcctcccccaattcaccaccctccaagattccgcgagcagaacaaggtcattttgcatgatgtgattgacattgatgacgactctgaggatgtagtgataattggtgaaaaagttaataatagtaacaaagggaagacaattgacgccgttcatgatgatcatcaagttgtgaaaacggctgattatacttactctctgcctggtgtggaaaattttggatcagttagtg

SEQ ID NO: 7007 - DNA, 251 bp, Glycine max
  Clone ID: 701099310H1
atctcgagcgtatcggctcgaggcttcgttgaaggagatgagactcggtggtgaggatactagcaatggtcatggtgacggtggtgtgagggacttgtatggagaggattgtgccactgaggaccagcttatcactccatggactttctctgtggccagtggatgcagtttactgagagatccacgctacaacaaagggctggcctttaccgagggagagagagatgctcattacttgcgtggccttttgc

SEQ ID NO: 7008 - DNA, 144 bp, Glycine max
  Clone ID: 701099311H1
gccaacgacgcccccgagggtcgtcgtttacgtccccgaaggtaaacgaccttaacgtgttgagctctttgcttcaactaacggatcacatatgttccctaaatctcacagccaccctcttaaaccgtgtttcctcttccacac

SEQ ID NO: 7009 - DNA, 274 bp, Glycine max
  Clone ID: 701099312H1
cagaagttgaagcagcgtttaaggttgtcgggccggcattgatttttgggttttgaaacatccttatctgtgttggactcagtccagtttgagagagaaagagagaacttgacacttgacagcgtcagacacgcgcctaattgattgttgtcctttgagctggtttctgcagtgtggtgtggttcattgcattgacatggcttctaaattcaagagtgtgtcctccattcggaagatcacgcatctgagcggtgatatggatcaggaggatgcg

SEQ ID NO: 7010 - DNA, 275 bp, Glycine max
  Clone ID: 701099313H1
caagaaaagaccatcaaagtttcacttcagccttatccggtttagggtttcggtttttgacccaacctttgacgtatcgaaaccttaagtttcggatcaggtctgagcaatctggttggtagaacctttggtcttagagagtcaagttttatgtctgaattagacgatcaaattcctactgccttcgatccttttgctgatgcaaatgctgatgactcgggtgctgggtcaaaggagtatgtgcatattcgcgtacagcagcgaaatggaaggaa

SEQ ID NO: 7011 - DNA, 266 bp, Glycine max
  Clone ID: 701099314H1
cggggctacccgctgagtttaagcatatcaataagcggagagatttgaacaaattaaaactcactttggctttccccacaatgacgagtttgtatgtaaaaagcaactaagtttccggttgtgaatcattaattaattagtactgttcttatatatctgcatactagtttgagtcaaagaagaaattaaggaaattaagaggtgatcaaagattattaattagctcttttgctgatgagagacacagtgaagttagttgtttatta

SEQ ID NO: 7012 - DNA, 282 bp, Glycine max
  Clone ID: 701099315H1
tcggagctctacaggaatgagataacaggaaagattcctaaggaacttggtaacttgaaatcacttattagcatggatttgtatgataacaagttggagggtaaaattccaaaatcatttggaaagttgaagtcacttaaattcttgcggctaaacaacaacaagttgacaggatccatcccaagagaactcactcgtctcactgatctcaaaatctttgatgtttctaataatgatctctgtggaacaataccagttgagggaaactttgaatctttccca

SEQ ID NO: 7013 - DNA, 276 bp, Glycine max
  Clone ID: 701099316H1
aggcgctgttctctcgtcttctacaaaattttctgttcgatctcaaccaaggttgttccttccaccgccatgagtttcatcttcggaaagcgaaaaacacccgcagagcttctgcgggaaaataagaggatgctggacaaatcaatcagagatattgagcgcgagcggcaaggcttgcaaacgcaagagaagaaattgattgcggagataaagaaaagtgccaaacagggccagatgggagctgttagagttatggcaaagctcttgttagaacaa

SEQ ID NO: 7014 - DNA, 269 bp, Glycine max
  Clone ID: 701099317H1
tatgagctacactacgctgcgagatttggaaattgaatccctaatctaatttcgaggtccaactcctgtggagtgtgtgtggtgctttcaatctgcatgatcatatagcgaatttgtgtttagcgaatcatatttgcagagtaaggatggggaaaaaccaagcctacaaagctatgcagagagccaggctcggcggcgcctccgccggccccgacgaggttgaagacggcatggtggatggttcatttcattcaccagaatggcatgca

SEQ ID NO: 7015 - DNA, 268 bp, Glycine max
  Clone ID: 701099318H1
tcattcaaaaggcccaagcatagcaccgagccaaaggtttccaaagttcttacacggacagatgcatctgatactggcttatatgtgagggacggatatcagtggagaaaatacggtcagaaagtcactagagataacccttctcctagggcttacttcaagtgttcatatgcccctagctgtccagtaaaaaagaaggtgcaaagaagtgtagaagatccaagtgtgttggtaacaacttacgaaggggagcacaaccatgggcaac

SEQ ID NO: 7016 - DNA, 239 bp, Glycine max
  Clone ID: 701099319H1
gcttatgatctggttgttggagttaatttgtatcatgtggctttgtttggtttaattaatttcctttgtgagcaagtgtcggttttatttatgtaacatttttaaagtgttactattataattcggtgaatttggttgagtatacgtatgaaaatgtgcgtgtgttggtgttgacgtgtttggtcatttgtattctgcagtaaatatattactataatggagaggaatcttaattagta

SEQ ID NO: 7017 - DNA, 267 bp, Glycine max
  Clone ID: 701099320H1
acagaatctactctctttttttctaccttagattccttctccaacaatggctctcgccgtttccactacttcttcctcttcagcagctgctgcagcttctagctccttcttctctcgtctcggatcttcctccgacgcaaaagctcctcaaatcggttcgtttcggtttccggagaggtcgcttgtttcgtctgttgttgtcaatgtaactcaacgacgctccttggtgaggccactcaacgccgaaccgcaacggaacgattctat

SEQ ID NO: 7018 - DNA, 270 bp, Glycine max
  Clone ID: 701099321H1
gcaaacttcaacttgtaatcaagggagagagtaaatttcaagcacaaaaaatggcggagaagaaagtggtgatcctaggaggtggtgttgccggtgccaaccttgcaaaaactatacaacgtcaagccaacgtcacccttattgatccgaaggaatattttgagattccatgggcaagtttgaggggattggttgagccaacttttgctgaaaggatagtgatcaaccatagagagtacttcaaaaagggtaaccttgttgtatccagtg

SEQ ID NO: 7019 - DNA, 268 bp, Glycine max
  Clone ID: 701099322H1
cattcacacactcaatgaagggagttacagtgaaagttgaagaaacaatggcgtatgctaatgctgcttcaactagcccaacaacatcttcaaacctctccccgcaacccatggaagggttgcacgaggtgggtccccctccgtttctcaccaaaaccttcgccgtggtggaagacccatccaccaacgacatcgtttcgtggagcagatcccgcaacagtttcgtcgtttgggactctcacaagttctctaccaccatcctgcctcg

SEQ ID NO: 7020 - DNA, 270 bp, Glycine max
  Clone ID: 701099323H1
cggctcgagctttctctttccctctctcaacttccctacaattcatatattgccaagtagtgcagatcccgtgcagaagccaaataaaatccctttgtttgctcacataagatttgggtttcttcaaaattatctttttttttctctcctaaaaaaaaaagagaaaactttgtttgattctttgaaggaggtttgaagaaagcaaaaggtgtagttttgttttaagtttctttgaaatggttttcatgtctgagatattgttccccgaag

SEQ ID NO: 7021 - DNA, 261 bp, Glycine max
  Clone ID: 701099325H1
aaaagccgaacgtcgcacaaaaaccccaaacctagcaatcattgagttttgtttgctttgaaacatcgtgtgcacagtaccccagtcgatcgaacaaggatctccacaaagacaaaccccagttcctcaactgtgttttacctctctctcacctactttcagaccatacccagggtttttgctttttctttttaaattagtttcagtgacattaacgaggctgagaagatgcagcagacaccgccaatgattcctatgatg

SEQ ID NO: 7022 - DNA, 269 bp, Glycine max
  Clone ID: 701099328H1
gtctgatttgaggttggagcgtagttagcttctcttttctgccgaaagctgcagaattgtgttgttttctctcctttgggggtcaaacaagcggttctcttcatgatgccaagtgttaaccctgacaaagattccgagccatttgttgagaccgatccaaccggtcgctatggtagatacagtgagttgctcggatgtggtgctgtgaagaaagtgtaccgtgcatttgatcaagaagaaggaatagaggtggcatggcaccaggttaa

SEQ ID NO: 7023 - DNA, 273 bp, Glycine max
  Clone ID: 701099329H1
ctgctccttatgttgttaagcctcaagggtctcaggttcctttggttcccattcctaggttgacgcctcagcaacctgcttcagcccccaagggtaaaaagagtgagaacaagaagagtgaggggaaaactacgaaggttgctagcattagtttgctgggtttgttcttctttatcatgcttttcggtgggcttcttcctcttgttgattttaggtttgggggtttagtggagaatgttcctggtactggtaggtctaattacgttagtgata

SEQ ID NO: 7024 - DNA, 279 bp, Glycine max
  Clone ID: 701099330H1
catcttctcacccagtttcactttctcattctcccctctcccattcctacagaaacagagagacagcgaaacaaatgcctgcggtaggaggtattaccaacggaggcggcaacgagtaccctggaagcctcactccttttgtgacggtaacatgtatagttgcagccatgggtgggttaatcttcggttacgatatcggaatttcaggtggggtgacatccatggatccgtttctgctcaagtttttcccgtcggtgttccgcaagaagaattccgaca

SEQ ID NO: 7025 - DNA, 283 bp, Glycine max
  Clone ID: 701099332H1
cctgtttctccggcctcgcttcttctctcagattcagataccaattcggtttcttctgaaccaaacttggtttgagaaattcggccgttaattttccatggccaacaatccatcacagcttctcccatcagagttgattgaccggtgtataggttcaaaaatttgggtgataatgaagggtgacaaggagcttgttggtactcttagaggctttgatgtttatgtcaacatggtccttgaagatgtcactgaatatgaaatcactgctgaagggagacggata

SEQ ID NO: 7026 - DNA, 255 bp, Glycine max
  Clone ID: 701099334H1
tagggaaggaagaaggaacaactatactactattatccttattattgttattattgtaattaatctttttattatagttattgttgttgttattattcctcaaatatggattcgttgtgcctctccaacgactcagttgtttctggattcaaagacaaggagtcaatggttgacccctttttggtcgaggctctccagaaccctcgtcaccgcctcaccattttgaggatggagctggacatccagaagtttttg

SEQ ID NO: 7027 - DNA, 264 bp, Glycine max
  Clone ID: 701099335H1
atcacctctacttttcctcttccaacacaaacactttccgtttcgttttttttttcttcagattcaaaccaaaccagagcaaaccaaaaaaggaaaagaaaaatcccaaaatccacaacgttacttcctttccttattagcgagaggaaaaaaaaattaatttaaaaggcttcttgtaaatttccctggaaacttcattttattttcctcttttctcttcttcgcgctcgttcgttcgttcctctgattattattcatcgatca

SEQ ID NO: 7028 - DNA, 260 bp, Glycine max
  Clone ID: 701099336H1
tttgttcacatcctcaacagccaaaaatttagctcaactccaaaatatggagatagaattttgtgaatcaattaaagagatagtgtctaaggagggggatgaatcacatgaggatgagataacatttccgcagctcaattgtttggtacttaaagacttaccagatctcagaagcttctacgaagggagtttaagtttcccatctttggagaaattgtcagtaatcaaatgccactggatggaaactttatgtccgggta

SEQ ID NO: 7029 - DNA, 264 bp, Glycine max
  Clone ID: 701099337H1
atccaatcgtggcggaaccaaagtagttagttagctatattacattacaattacatgtggggctgtcggcagcgccttgttttgtactgtacttgtccaatatgtgatgactaagccaaggtagatctattatagtattatctatgtcatatgatatatgctagacgtacgtacaaattagttttgtctttgtttttgtgctgagtgtgtgacaggaagaaaaaaaaaagtcaaaaggtgttctactgcatttgaatccagtgc

SEQ ID NO: 7030 - DNA, 265 bp, Glycine max
  Clone ID: 701099338H1
gctaccgtaagattaaacaccaaaaagatccagattctcctggtcttactatgaactatgaagggagcttgaagtgatgttcggataaaaggtttaggtagtggccaaccttaacaaatcaaaagaagttagcaattgataaaaaaaactcacagatgcatcatcaacttgctctacctaccaccttattttcggccttgtgaggaacaaagggtctaaataaatagccttgtataacgactctaattaactcaccctttttgtc

SEQ ID NO: 7031 - DNA, 117 bp, Glycine max
  Clone ID: 701099339H1
tgattgttgatttcattttcctctggcggaagccatttttcgatctgttggtgtgctttctggaaaggtcgtggatggcaaaaaacaacaagtacgcctctattaacttccacacaa

SEQ ID NO: 7032 - DNA, 211 bp, Glycine max
  Clone ID: 701099340H1
ccttgatgctgccggaaacacgactgccgctattgggaacggacttgccattggttctgctgcccttgtatcactggccctctgtggtgcctttgtgagccgagctgctattacaactgttgatgtcgttgactccaaaggttttcattggtttgattgtgggtgcaatgcttccttactggttgtctgctatgactatgaagagtgtcgg

SEQ ID NO: 7033 - DNA, 268 bp, Glycine max
  Clone ID: 701099342H1
gaatataccttctttcaccctcccttcaacactcttttgcctctttattcttctaagtctcaaagcaaagctcgaagacctgagaagaacaaagggttgattaaattctgtgtggttgttgttggaggttgaaacacaagttgccaccccaagtgtgtgttaatcttaaatttcacaagcaagttgcttttctggagtattatattgtatgaccaaatatttttgtgttttaggactagatattttgcttctggtggcatttttctct

SEQ ID NO: 7034 - DNA, 271 bp, Glycine max
  Clone ID: 701099344H1
gcataagccatgcttctgtggctacctcaaaaaccctagcttgaagcagtatgttaactctcctaatgccaaaaaaaccgttagttcttgtggtattgcctatccaacttgttaagcacctcttatatatatatataaaatgtgtgaacaatatatatatattgattaaaaaatatagtttaatttatatacacactttgatcctataaaaacatcttgacacaagcattcaatagaatttcaccactttatcatgacattttactataat

SEQ ID NO: 7035 - DNA, 274 bp, Glycine max
  Clone ID: 701099346H1
caattcacaaccgaaacagtttccatctctctcacaaaatgacaacaatatcaaattgctcccttctcttcctcttcctcttcctctccaccctccacatagcttccaccctctcaacccccaccaacttcatcaagtcctcctgcagcaccacccagtacccagccctctgcatccagtccctctccgtctacgcctccaccatccagcaagacccccacgagctcgtccagacagccctctccctctccctcaaccacaccgaggccacaaa

SEQ ID NO: 7036 - DNA, 265 bp, Glycine max
  Clone ID: 701099347H1
cggctcgagctagaacgaaaaaaaaaaagaagagcaattttccctcaccaaagatgaagaagccaacaatggccgatcaacttaccgatgaacagatctccgagttcaaggaagccttcagcttgttcgacaaggacggcgatggttgcatcacaaccaaggagcttggaactgttatgcgttcattggggcaaaacccaactgaggcagagctccaggacatgatcaatgaagtggatgctgatgggaatggtaccattgactt

SEQ ID NO: 7037 - DNA, 280 bp, Glycine max
  Clone ID: 701099348H1
cctcgagccgaatcggctcgggatgaattgggtgatgctactagctctgcagcaatagggcatgatgcagactcaaacagtggaacagaggatggcattcattcttcaactgcctttgaattctacttacaaggaatagagagggcgaagataatagtgaaaaaaccattaccacaagtcacaacattgcctggaaagctgcctgtggtagttgtcttgtggtcggataagatgcttaacatgtatgatacatacctgcttgactcattgcctgaggttt

SEQ ID NO: 7038 - DNA, 262 bp, Glycine max
  Clone ID: 701099349H1
atggtggtggtcccaatttccatgctactgaggataagccagtcatattcccccagtcctttgttcaacccaacactacaacacagtctgcaagtttggttgcaccttcatttgatctaactggtcttggagttccggaggatggacagaaaatgattagtgaccttatgacaatctatgatacgaatgttgtaggaaacaagaacttaagttcctccaactgtgtagctgtagaaaatcataacctttctcaggccagctt

SEQ ID NO: 7039 - DNA, 246 bp, Glycine max
  Clone ID: 701099350H1
gccactaagaatgacctattaggtatacttttggagtccaatcacaaggaaattcaagaacacggaaacagaaacagtaagaatgttggaatgagtcttgaagatgtaatcgaggaatgcaagctattctactttgcagggcaggaaaccacgtcagttttgcttgtttggacaatggtgttattgagtaggtaccctgattggcaagcacgtgcaagggaggaagcctttcaagtcttgggatac

SEQ ID NO: 7040 - DNA, 266 bp, Glycine max
  Clone ID: 701099352H1
ctctttttgttgttgttgatcacctcctcaacccactattccaccttcttctacgtttttctcttcccaccccttagtctcagaatcagatcacaccaccgcaaaaccctaaattcaattttctccatttccgatcttgcccccggactgcaaatggggagcaggagggacgaggcgcccgccataaacaacaccaacgtcttcgcggcgctcggcagcttgaagaagaagaagaagcccgagaaggaccaggaccagggcccgtc

SEQ ID NO: 7041 - DNA, 269 bp, Glycine max
  Clone ID: 701099353H1
cgacacagtttccatctctctcacaaaatgacaacaatatcaaatcgctcccttctcttcctcttcctcttcctctccaccctccacatagcttccaccctctcaacccccaccaacttcatcaagtcctcctgcagcaccacccagtacccagccctctgcatccagtccctctccgtctacgcctccaccatccagcaagacccccacgagctcgtccagacagccctctccctctccctcaaccacaccgaggccaccaaaacctt

SEQ ID NO: 7042 - DNA, 267 bp, Glycine max
  Clone ID: 701099354H1
gtaatttgcaaacacaccaaaaccatctctctctctctctctctctccaattcagacccctagttctgttggatcttgcatatagtaaccctttattgattcgcaaagatgaaggtcacagtggtttctcggagtggaagagaagtggttaaaggtggcattgagctcagtgattctccaagaagtacccatcaaggcagcgcttgacacttccagtccaacctggatcaaaggaaaggcctgttgtccttaattacaaaaagagtc

SEQ ID NO: 7043 - DNA, 266 bp, Glycine max
  Clone ID: 701099355H1
cgatggcaagctttcaggggtgaaagcacagaggccaaagatctaatctttactctgaagcgttcgtcccttatccagtttaagaccaaattagatgtgtttttggccaataacacaaaagaagatgtttgtgactttaaggtcaaaggtagttggttggaacgatcttgcgttgtttatgctggtgaatctaacaacatcgtagcccagatgcataaaaagcacacggttcagagtattttgattgggaaagaccaattcatggt

SEQ ID NO: 7044 - DNA, 270 bp, Glycine max
  Clone ID: 701099356H1
gttcctccgctcaacaactataataacatctttctctctccgaacagatcacactatggccacctcaagcgccaaatcagtccatgatttcaccgttaaagatgccaagggaaatgatattaatcttggtgactacaaaggaaaggtccttatcattgtcaatgttgcctcacaatgtggcttgactaattcaaattacactgagctcagtcagttgtatgagaaatacaaacagaaaggtctggaaattctggcatttccatgcaatca

SEQ ID NO: 7045 - DNA, 269 bp, Glycine max
  Clone ID: 701099357H1
tgcgttggtactgaattccttaatcgagtccagtattcataatctttgagttgatatgggcaactgcgagcagtgaacgtcatcaaaccactcaacaaagtgatctcggtgcagttttgcgtgatggaaaagaagtacttcttcaagcattcaactgggagtccaacaaatacaactggtggaataatttagaaggcaaagtttctgacatagctaaagcaggatttacttcagtctggttgccaccaccaacccactccttctcacct

SEQ ID NO: 7046 - DNA, 267 bp, Glycine max
  Clone ID: 701099358H1
caccggtttatgtcctcctatgaacagagggtgcaaccctttgataaaaggtatcagtacctcttgtttgctgctgaaccatatgaaatcgttgctttcaaggtgcccagcacggagattgacaagtccactccaaatttcttctcgcactgggatcctgactccaagatgttcacgctacaattgtattttaaatccaagccgccagaggcgaacaaaccgcagcctgcctctactgccaatggcacagcaccatctggtgtacca

SEQ ID NO: 7047 - DNA, 269 bp, Glycine max
  Clone ID: 701099360H1
gttccattctgaaaagtaaaaaaatacaaaacaaaaattgaaaattccaagttggggttctcacgatttcgattcaccctttctcccacacactccgattcttcttgtaaacagcggtgccagaagttgatataggatgggggcaatgatgtcgagattctggttcatgttattccctgcaaaagagtataagattgttgttgttggattggataacgctggaaaaaccactaccctttataaattgcatctgggtgaggttgtaacta

SEQ ID NO: 7048 - DNA, 274 bp, Glycine max
  Clone ID: 701099361H1
gcaaactgcattgcatatggctgtaaaagggcagagttgtgatgtggtgaaattgcttcttgaggcagatgctgctattgttatgcttccagacaaatttggtaacacggcgttacatgtggcaaccaggaaaaagcgagtagagatagtgaatgagttattacatctgccagacaccaatgtgaatgcattaactagagaccacaaaacagctcttgacattgctgaagatcttcccctctccgaagaggcatcagatataaaggactgtctt

SEQ ID NO: 7049 - DNA, 271 bp, Glycine max
  Clone ID: 701099362H1
caaagctgaagtgtctgcttcttccgattccggcacgcccccatcaccatggtgaacgttccgaaaacaaagaagacatactgcaagagtaaggagtgcaggaagcacaccctgcacaaggttacccaatacaagaagggtaaagatagcattgctgcccaaggaaaacgccgttacgatcgcaaacaatctggttatggcggacaaactaagcccgtcttccacaagaaggctaagaccaccaagaagattgttctgaggttgcaatgcc

SEQ ID NO: 7050 - DNA, 251 bp, Glycine max
  Clone ID: 701099363H1
accagcatctcattcccgtccccggcgactgagtagcggtctcttcccaactcggaactcagtccattccgcatttcaattttctcttcacttggcaaagaccaaaccaaaccctggctgaagaagagaattgactgagaagaagaacacagaaatgggctccgaactgattttcagagggcacgagacccagcccgtggacgacgcgtactcaccaaagccccacaaaccctggctcaccgtgactcgcc

SEQ ID NO: 7051 - DNA, 279 bp, Glycine max
  Clone ID: 701099364H1
cagcaaactaaatgtgaagtttgccagaaacaagatgggaaggaaccattttcagcagcaacactgtgctgatgggagcatgtggatggagagtcagggtcagcaacagagctatgccttccaagaagagtcttggagccctgataacaactatggccacaaccacaagcaattcccaggcatgcacatgaacatgaacaacaacaacaacaacaaaaggcttggtgcttttgctgctgtggactctgacttctcaatgcaaaaacatcatcatgggca

SEQ ID NO: 7052 - DNA, 263 bp, Glycine max
  Clone ID: 701099365H1
gcgttggtactgaactccttaatcgagtccactattcataatctttgagttgatatgggcaactggagcagtgaacgtcatcaaaccactcaacaaagtgatctcggtgcagttttgcgtgatggaaaagaagtacttcttcaagcattcaactgggagtccaacaaatacaactggtggaataatttagaaggcaaagtttctgacatagctaaagcaggatttacttcagtctggttgccaccaccaacccactccttctc

SEQ ID NO: 7053 - DNA, 258 bp, Glycine max
  Clone ID: 701099366H1
atctaaaggtgctgctctcgaaatctgataagaccaacgttcagcttcagtttgctaacgtagaggactctgcaggccacgtagggcgtttgggagtgagtttaattaccactttgtctcttggattcgcttacttacttctccttttgtattaattaggtctactcgtgcgtcacgctttaccttggttgtaataattttatgattgttgaatgtgcatcagtgcatgttcccccgcgcatgatttctttttgtttt

SEQ ID NO: 7054 - DNA, 260 bp, Glycine max
  Clone ID: 701099367H1
ctccatggtatctttgaggctgcaagttttggaggatctaatattgatccaacggcttgggaggataagaagtgccctggtgaatctcgtttccctgctcaggttcaagtgattactaggaaagtttgtgagccactagaggaagattccttcagaccaattcttcaccactacgacggccctaagttccgtcttgagctgagtgtgcctgaggcactgtctcttctggatatttttgcaaaccagaacagtttcgatga

SEQ ID NO: 7055 - DNA, 263 bp, Glycine max
  Clone ID: 701099368H1
cacaacgcaacattcctttaaaatatggattggttctcctggctttccaaaacaggccttgagccaaccctagtgtatgagtatggccttacttttgctcacaacgagcttgaagaagaagacataacatacttcaaccatgagtttctcatgagcatgggaatctccatagccaaacacaggctagagattctcaagcttgcaaggaaagtgaagggaaagagggcggcaccaccacgccctgtggcaaggctcatggtggc

SEQ ID NO: 7056 - DNA, 263 bp, Glycine max
  Clone ID: 701099369H1
tgaacatgtgcagaaagaatctttgaagtttgaacatgtgtaggatcaatgctttaaaacttgggggtatcgaattatgtgtcctgtcgcaatcttaggtagatatgctggaacagagaaaaattgcctctccgcatcaaattggtgccaggaatgttttctgctggttgaccttgagcaattgttacaaccagaaaatgctaattcacaagaaattcagttttttgcggctgtgcccgttatttggtgacaacttctgacca

SEQ ID NO: 7057 - DNA, 263 bp, Glycine max
  Clone ID: 701099370H1
ctgtataacatataaaaggtaaccatgtctctttaggctgtaccagtggtgtttttgctggcaacaatatcactagccagtgatgacaccagtttcacctataatgggttccaatcttcttatttgtaccttgatggaagtgctgagttcaccaccaatggcatgcctaagctcaccaatcacaccaagcaacaaaacggtcatgctttcttcccaagtcccctagtcttcaagaacaccacaagtggaagtgtgttttcttt

SEQ ID NO: 7058 - DNA, 264 bp, Glycine max
  Clone ID: 701099371H1
ataaaaaggtaaaaaggatggaaaagtttatatcaactaacgcaactttgtatcaagagatggaactgctggctgatcttgagcaaactcttgaaagaatgaaggcttacactgaatcagatgaaccaaatttaattgactatcaaaagaaggttgcatggaaggggctggaggtgaagaacttaaaggctaattctctgtggaacagaacatatgattacacggtgcttgttttagcaagatctttatttacaatattcagta

SEQ ID NO: 7059 - DNA, 266 bp, Glycine max
  Clone ID: 701099372H1
acaacatcctccgacaccatgttgcacatggaaaaccccctcctgcagtcaacaaactcaattaccttcacattctttgggctgttgttatttctctttgttctttcatccatattcagaaaccgcggtgctgcaacaagaaaagcaccaccagatgcaagatgcgcgtggcctttaattggtcacatccacctcttaggtggctcaaaaccaccccatgtcacgttgggccacatggcggacaaatatggtcccgtcttcacctt

SEQ ID NO: 7060 - DNA, 264 bp, Glycine max
  Clone ID: 701099373H1
aacaaagatggctaggtctagtgcttatcctttgttcttgatttcttccattctgtttatttcacacatttatgccttcaaagtagaagccaagcccccagtagtgaagggactatcatattctttctattccaaaacatgccccaagcttgagtccattgtgaggaaacatctcaagaaggtgttcaaggatgacaatggccaagctcctgccttactccgcattttcttccatgattgttttgttcagggatgtgatggatc

SEQ ID NO: 7061 - DNA, 257 bp, Glycine max
  unsure at all n locations
  Clone ID: 701099375H1
ctcgagccgatcacacttttgtgttgtgttgggaaaccctaaaccccgttttcggtgagaccgagatcgatcgaacatggatgacgagtacgatgtgatcgtgttgggcacgggtctcaaggcgtgcattctcagcggtcttctctccgtcgatcgnctcaaggttctgcatatggctcggaacgactattacggaggagaatccacttcgctcaatcttattcagctttggaagagattcaggggagatgacaagc

SEQ ID NO: 7062 - DNA, 266 bp, Glycine max
  Clone ID: 701099377H1
ctaacggctacttggtagttggagtggtagcttttgctctactttgctcattcagagtttctttgacagattcagttccattattttcgcctgttcatgacgctgcttctttgactcgcaactctttccctgctggcttcatctttggggctggatcctcagcctaccagttcgaaggagcagcaaaggaaggtggaagaggaccaagcatatgggataccttcacacataaccatccagaaaagataagagatggagccaatgga

SEQ ID NO: 7063 - DNA, 257 bp, Glycine max
  Clone ID: 701099378H1
gtgatcttacagatggaattcgtgagattttttgattgctggaatgattttcaagaaaaggccacaacccaagtcttgattgttttggacaagtatgagaaccgcgatacttatgtggtagctttccgaggaacggaaccctttgatgcagatgcatggtgcactgaccttgacatctcatggtacgggattcccggcattggaaaaatgcatggtggcttcatgaaagccttagggctacagaaaaatgtggggtg

SEQ ID NO: 7064 - DNA, 270 bp, Glycine max
  Clone ID: 701099379H1
cttcaaaggtgtgcatcccaagtttccaaatggaggactcatgtctcaacatttggactctctacccattggatccatgttggacgtgaagggcccattaggtcacatagaatacaccggaagaggcaacttcatggttcatggaaaaccaagattcgccaagaggttggccatgttggctggtggaactgggatcacgcccatttaccaagtggcgcaacgattttgaaggacccagaggaccacaccgaaatgcatgtagtgtatgcg

SEQ ID NO: 7065 - DNA, 277 bp, Glycine max
  Clone ID: 701099380H1
ctcaacttgaccctggcaaaaactgaggcaaaattgctgcatgagaagatttcaaacaaggcttataatgatgacgacttcatcaggattttggccacaaggagcagagcacagattaatgctactttgaatcactacaaagatgcatttggacaagatatcaacaaggacctgaaggctgatccaaaggacgagttcctgtctttactaagagcaactgtgaagtgcttgatccgtcccgagaagtacttcgagaaggttgttcgcttggcgatca

SEQ ID NO: 7066 - DNA, 220 bp, Glycine max
  Clone ID: 701099381H1
cgttgcaccacttcttctaattcttccttatgcattcaccttccttggatggacggctgggatcttaagcttagtgattggagctttggtcactttctattcatacaatttaatatctagggttcttgaacaccacgctcagatgggtatgcgtcactacgctttagagacatggctcgcgatattttaggtccagggtggggtcgttattttgtcggcc

SEQ ID NO: 7067 - DNA, 256 bp, Glycine max
  Clone ID: 701099382H1
aacaactactatgggtatggcagatgctaagcaaagatatgctgttgtcacaggtgcaaacaaagggataggattggagacagtgaaaggtttagcctctaatggaatcaaggtggtgctcacggccagggatgtgaagaggggttaccaagctgttgaggacttgaagagagaatttggtttctctgaccttgttgtgtttcaccagcttgatgtcactgacccttctagtattgcttctttagttgagtttgtg

SEQ ID NO: 7068 - DNA, 257 bp, Glycine max
  Clone ID: 701099383H1
ccagggttacctagacccagaatatttgttgactcataagctgactgacaaatgtgatgtctatagcctgggaattgtgtatctggagcttttgacaggcatgcaaccaatatcacatgggaaaaacattgtccgcgaggttaatacggctcgtcaatctggcacaatatattccatcatagacagcagaatggggttatatccatccgattgcttggacaagtttttaactctggccctcagatgttgccaagaca

SEQ ID NO: 7069 - DNA, 260 bp, Glycine max
  Clone ID: 701099384H1
gatccctaatgttgtaggctctatgtacacctctcatgtgcctattatagctcctaagattagtgtggctgcttatttcaacaagaggcacactgagaggaaccagaagacttcttatagtattactgttcaaggggtggtggatcatagaggggtgttcactgatgtgtgcattggttggcctggttcaatgcctgatgatcaggtgttggaaaaaagtgccctttttcaaagggctaatggggggcttctgaaggggg

SEQ ID NO: 7070 - DNA, 263 bp, Glycine max
  Clone ID: 701099385H1
aaacaagagagagctagcagtgcaagctttcaacatccaaaacaacagagagtttttggctttagaagctgaaggaatatagttatcacaatggggagagctccatgctgtgagaaaatggggttgaagagagggccatggactccagaagaagatcaaattctcatcaattacatcaacacttatggccatgctaattggcgtgcactgcccaaactagctgggctattaaggtgtggaaagagttgtagactccggtggat

SEQ ID NO: 7071 - DNA, 264 bp, Glycine max
  Clone ID: 701099386H1
ctttgtatgagcttgtttggactgcacaaacaattgctccagacacgtgaaggtgctattgatggacaccttcgtgaagttggactcacatttcacctcctcaaggatgttcccgggattgtctcaaagaacattgataaggcactttttgaggctttcaacccattgaacatctctgattacaactccatcttttggattgcacaccctggtgggcctgcgattttagaccaagttgagcaaaagttgggtctcaaacctgag

SEQ ID NO: 7072 - DNA, 264 bp, Glycine max
  Clone ID: 701099387H1
cttcgatcttcgtcgctgaaaatgagagagtgcatttcaatccaactcggccaggccgggattcaggttggaaacgcctgctgggagctttactgcctcgaacacggcattcagcctgatgggcagatgccaagtgacaagaccgttggtggaggtgatgatgctttcaacaccttcttcagtgaaactggggcaggaaagcacgtgccccgtgcgatttttgtagatcttgagcccactgtgattgatgaggttaggactggg

SEQ ID NO: 7073 - DNA, 263 bp, Glycine max
  Clone ID: 701099388H1
cagtaatgaagaattagagagagtgagaggaggaagaagaagaagaagattccagaatccagagtgagaaacattaggcttatcagaggagacatgcccgagttgaaccgacaattctattactactctttgcttctttcttcatgcctcatcaaatcccaaaggatataattgaaggttttgggaactaaggctgcaatattgtatacattctactcaaggaatggtcaagatctggaaatttgctatgtggaaaggttaaa

SEQ ID NO: 7074 - DNA, 253 bp, Glycine max
  Clone ID: 701099389H1
ctcgagccgcgcgtagcccaattctcgtttgatgtcccagaatctcaacttaaatgcaggtcttagcggacaatggcagtgataatagtcaacatctggagctccctaacttaaacaagtctagtgggtcagcaaacgagtgtataccacctaatgttggatctggttcttttctgcttccttctggaaataatggcttcctggtagaagatactgatggtaggccaggctgttctcatgatactcgacgtgt

SEQ ID NO: 7075 - DNA, 242 bp, Glycine max
  Clone ID: 701099391H1
ccactatgcatctcacacatgagatcaaaattacataacacaaaacgcataaccctaatctccttaattcctgtgcgtggaaaggttcgagaatggtttcgctggaggaatctcgctcgaattcgagccgttttcccttggcgaggagttaccagtaccactcctcggtttcgtccaaaacgcagcgtcaaattggaaggtccatgcgcactatacgctccaatttcttccaagacgacaac

SEQ ID NO: 7076 - DNA, 262 bp, Glycine max
  Clone ID: 701099392H1
ctccaactaatcatacagatcgataatcataatcatatctatagctaattaacttaattattttcatccctctactcttcttctctcctctaaactctcttttccattcttgcttcctttgtgggttgtttgagttttctttccttcaatttaattgaaagatggcttgcttggtatctcgctcgggaagggaattgcagaggtacaacaacatgggtggccggcaagttgttgggtgcataccttatagatataaacaaga

SEQ ID NO: 7077 - DNA, 265 bp, Glycine max
  Clone ID: 701099393H1
cctagctcgggttcagagactattgagtgtggagtttgccagcacccatttcttgtgagtgctcattgagttccgataaacattaatatggatgagaaggtgtcttcgtgtttcacaagtttaaaattcatttgttttactgagctatctcttgcacattaattatcaatgattgggattgccttccttttactattatttttgggcttgtttcatgtcctagttttaccttgcatgcatcttttttttatttttttattttgtg

SEQ ID NO: 7078 - DNA, 270 bp, Glycine max
  Clone ID: 701099394H1
gccacaagatcatcaacgtgctgaacccggtgtttaagggtcagcaattggtgccactcaacgctgaccaatccgcggaactgaagaaggagaacgccactggggtgtacgagatcgatgtgaacatgtaccttagggtcaggttcaagttgggtgtcttcaagaccaagacgcttaagcccaaagtatcatgcgacttacgtgttcctttgaaaggaagcgccggtgctggtgtctttcagaccaccaagtgcgactgggatcgctgat

SEQ ID NO: 7079 - DNA, 267 bp, Glycine max
  Clone ID: 701099395H1
tttcattcctcctctttctctatactatttacgtttcaagtaaaaaacaaaaaaaagttgaaggaaagccaaaactagattagattagaaccaaaccaacaacaaatcatctatctatctcgcgcagatccatttcccttcactttcccgggagaaaaagaaacctccgtttcgcgagaaaccccgtccgtacatggtctgttcacgcggatcgggttgattgaccaccaccaccaccaccaccaccaccatcgcgcgtgagatgca

SEQ ID NO: 7080 - DNA, 191 bp, Glycine max
  Clone ID: 701099396H1
acatattcgtcgaacacgtggttgatgtcgaactctccgaccgtctcgtccacgtcctcgcttcagcagcacaacaagaccaaaccctcgatttccaagacatcatcaaacgtttcgcgttcgacaacatctgcaaaatcgcgtacgggtatgacgcagagtaactgacgccgtcaactgaacagagtaag

SEQ ID NO: 7081 - DNA, 272 bp, Glycine max
  Clone ID: 701099403H1
cggcattaaaaatgcagatcttcgtgaaaactctgacagggaagactataaccctcgaggtcgagagcagcgacaccatcgacaatgtcaaggccaagattcaagacaaggaaggtactacacataaattccaactccattcaacgaatcgcgttttcaattttccataacctaaaaaatctctcgtctgaatttgtcaggcattcctccggatcagcagcgtttgatttccgccggaaagcagcttgaagatggaaggaccctggccgatt

SEQ ID NO: 7082 - DNA, 271 bp, Glycine max
  Clone ID: 701099405H1
acgattacgaagcaattacatgagcatgggggaagctcatagaaggatcacggagtatctgaatcgcttttccgacgcgatttcttcgcaagacggagctacgttcaagtctctcttcgctctctcttccaactccccattccttctctctctgggcgacgctctcaacctcttccaagaccccaacagactcatcaagcaatccgacaactattcccagttcgcagacatcctcgtccctctcttccgatccctcctaaactaccgccag

SEQ ID NO: 7083 - DNA, 147 bp, Glycine max
  Clone ID: 701099406H1
cggcacacttagatttttcactccaattccgattttcccaccaccgttctccgacattttccgggaaaattctgtgcccttctcctcactcgctccaacagaccccctctttcgattctctttcggttctttcttttctttcttttc

SEQ ID NO: 7084 - DNA, 270 bp, Glycine max
  Clone ID: 701099408H1
ctcgagcgcttgcatatcctatctacctgtggagcatgagtcccgggaagactggatctcactttaatccagacagtgacttgtttgttcccagtgagagaaaagatgttattacttcaacaatttgttggacagctatggctgctttgcttgttggtctgggatttgtgatgggtccagttcaattgcttaagctttatggcattccctatgcgatttttgttatgtggttggatttggtgacttatttgcatcaccatggccatgaag

SEQ ID NO: 7085 - DNA, 271 bp, Glycine max
  Clone ID: 701099409H1
cccaattgcaacatactaagtgggttggctggtttagatctgagcaacagcttttaattttctacttgcttgaattttattggaagccatggattgttcatcatggattaacacttccttggatctcaacattaatcccgcagagttcatgaagaagttcccaaggaggtagaaagcgagcttttctctttgggaatgaccaagtttaacgtggaagaagagtctactagtgacttggaggaggaactgaagcgggtgactgcagaaaaca

SEQ ID NO: 7086 - DNA, 272 bp, Glycine max
  unsure at all n locations
  Clone ID: 701099410H1
ctgaattcaactcacttcaatttctttaccttatatatatctatccaattaaccactcttatatttagaatccaaaaatctctcgtcgtccaagaaagaagcaccacaaattaattctcgtttcccattcccatcccctgccaactattttgcataggattttccttctttacaacctcgtacactcattcctcctctgtctggtccccaagaaggtgcgtcncttcctcnccccttcttggttccaaacanaaccatcactgcaccttctt

SEQ ID NO: 7087 - DNA, 262 bp, Glycine max
  Clone ID: 701099411H1
caaatatgcactcatggcttaccactatgaccctcaagtctctctacctgagctctcatccatttcactctacactccaaaacttgttgaagttgtcaaagagaggccaaaatggaatgccacagaattcttcaaacaatccaccccaacacgccttaccttcaccaactaccttgcagctggggagcagtgttcttcccaaagcattggagagagttctatgtgtacatgaacatgaggttcactgaggatgccaagtcca

SEQ ID NO: 7088 - DNA, 267 bp, Glycine max
  Clone ID: 701099412H1
gcataactgactcgagtataagttacatgttttgcgtgtgtgtctggcattctgtcttggtttttaagggctactaccatctttttcaaaagtatcatgttcttatccaaaaatgggtatgtactttggggatttgaggattactgttgtagtaattttttatggttattggtaatgactattatttacttgttaattctgtgtatcatttgaatatcaattatttcttctggatcccttttgcaaaccatttttccttccatttaa

SEQ ID NO: 7089 - DNA, 271 bp, Glycine max
  Clone ID: 701099413H1
gcagctttggagaactgggaagaaagattatgagactattctcggctttctgcgtcggtgatttcttcccttcgttgggttgggttgactatctgactggccttattccggaaatgaaggccacgtttcttgcagttgatgctttccttgacgaggtaattgcagaacgcgagagcagtaacaggaagaatgatcactctttcatgggaattctccttcaacttcaagagtgtgggaggcttgactttcagctcagccgagataacctcaa

SEQ ID NO: 7090 - DNA, 265 bp, Glycine max
  Clone ID: 701099414H1
gaaacatttcactaatagagagacataagcataatattgagaaataatggagggttgtacttattgtgtgaagttgctatgccttgttgggtttgtggtgcttgtgagtactattgcaggggtggagagtgctggtgaatgtgggaaatctaccaccccagataatgaggcttataagcttgcaccatgtgcctcagcagcacaagatgagaatgctagtgtttctcagagttgctgtgctcaggtgaagaaaattgggcagaac

SEQ ID NO: 7091 - DNA, 272 bp, Glycine max
  Clone ID: 701099415H1
tgaaattataaaaaacaacaacaacataggagatacaaagaacaaggattgattcgtatcagagagagaggagatgggaactgttacacgcagctcctctgaagtgtattcaagtgacagtgaaaaggggtttgcgtgaaccactctacttctacttccccagagctagatgcacgggcaaagtttgttcttgtatctcgaggatcatggttgcactgtgggtaccatttgactacatctattgtggctccggtgcttcttactcttccttt

SEQ ID NO: 7092 - DNA, 272 bp, Glycine max
  Clone ID: 701099416H1
cacgtttctctcttgaggttaattattattattattgagtattgagcatggaggcgccatctctcaccaaacccaacgacccaacaaaaccttccaacacttccagcacccttagtctggagggggggccgggcgaacgcgcccactccgaaaaatgtttgcggtggcgtccatcgccgccggcatacagttcgggtgggctctgcagctgtctctcttaaccccctacgttcagctcttaggagtcccccacgcggcggcctccttcatct

SEQ ID NO: 7093 - DNA, 267 bp, Glycine max
  Clone ID: 701099418H1
aataactccgtcaggggatgtatttttgctagaggccaaccctcgagcttctcgtacagttccattcgtatccaaagcaattggccatcccttggctaaatatgcttcccttgtcatgtctggaaagaccctctgtgatttacatttacaaaagaagttatccctaaatatgtgtctgtaaaggaagcagttcttccgttttcaaagtttccaggctgcgatgtgtttttaagtcctgagatgcgaagactgtgtgaggtcatgggt

SEQ ID NO: 7094 - DNA, 264 bp, Glycine max
  Clone ID: 701099420H1
ctcaccttctttctttcttccttctcatcacaaagacacaagctttcttcctcaactatcctacccaacttcttattccactcatcacttcctttcaaattgaaaccaccaaaattgtttttttttagctcctttacccgtgtaatattttgaaaagtgttgtaccttgggttgataattgtggtagggcctaatgggtacgtgcctatcttcttgtgcctaggttgatgcacctctgatactcgaatccattgctgcatcagg

SEQ ID NO: 7095 - DNA, 273 bp, Glycine max
  Clone ID: 701099421H1
gtattatctctctcttgagagttgagagcatggagattggtcctctcttccccaacttagcgtggtggcagcaagtcaacgcctctacttgctgccaggacgctgttttctacttcctatgcgctgcttatgctcttgtctcttccaccgctttgattcaattggttagaattcaagttagagtacctgagtatggttggactactccgaagatttttcatctcatgaacttcattgtcaacggagtgcgtgcagtggtgtttggattgcaca

SEQ ID NO: 7096 - DNA, 270 bp, Glycine max
  Clone ID: 701099425H1
cggaaatctccaacctcctcgttgctcatcttcaccgaaccaaccacctcaacaattttccaaaccaaaacctcaatagagagaaacaaatttttcagaggccatcatggacagagaacaagaagagatgcaatttcttgggttctttgacatatacaaagaagcctctaagatcatactttcatggaggaaaatcttcacccaaatcacctcaacactaatcctgcctctctccttcatcttcctaatccacatggaaatctccaacct

SEQ ID NO: 7097 - DNA, 265 bp, Glycine max
  Clone ID: 701099426H1
cttctttctccaatttcctctctcacatcacgtcacatcacatataaacatcctctccttgaaacccttaattgtgctcaaaaatactatatagttaattaaggttgtgtgaaaatgcgaatgagttgtaacggatgtcgtgttctgcgcaaagggtgtagcgaagattgtagtataagaccgtgtttgcaatggatcaagaacccggagtcacaagctaatgcaactgtttttcttgccaagttctatggtcgtgctggcctca

SEQ ID NO: 7098 - DNA, 269 bp, Glycine max
  Clone ID: 701099427H1
ggatttgcaaaggagactaatcaatggaagctggaatatgttgcttgccacagattcagatgacaacacagaacatctagataacaaggcaacatgcatgaatttgcaaggtgtaggtcctgataatagttattccattaatgaagcaatatcagaaagtggcatcttctctggaacaggcacagaccaccttttagatgctgtggtttcaaaagctcaatcttctgcaaaacagaattatcatgaaatgtcatgcaggacaacattga

SEQ ID NO: 7099 - DNA, 267 bp, Glycine max
  Clone ID: 701099429H1
tacccacccaaagctgttgctaagatggccgctgttgctgcactgtgtgtgcaatatgaagctgatttcagaccaaacatgagcattgtagtcaaagctcttcaacctttgttgactgcacgacctggacctgccggtgaaacaccaaattaatctttgtatcactttctctctatatttgtgagtatgtgcacaagtgtgcatgcaaaatataagagactgcttcagaagctggtggtttgctttgcaccggttgtacggtgagga

SEQ ID NO: 7100 - DNA, 285 bp, Glycine max
  Clone ID: 701099432H1
tcggctcgatcgcaaatcagagaatccaaatgctttggaacaacttcaacaccgataagatgtggatgcaggcgctctctttgtcctcaaatccaaaggttcttggatgcattgtgggtaccattgacaacttcgatcgtggcaccactcttctaagtcttccttatgcattcaccttccttggatggacggctgggatcttaagcttagtgattggagctttggtcactttctattcatacaatttaatatctagggttcttgaacaccacgctcagatgggta

SEQ ID NO: 7101 - DNA, 286 bp, Glycine max
  Clone ID: 701099433H1
gcagaaatggcggcggctacggcaatttctcagcttggctgcttctccgccgtccaccgcagctcacacctccggcggcgctcgcttctactcccttgccctcgctccaagttatcagttgttatgagtctggagaggcatgacaagatactgctgggtctgataccaaaaatacactaagttatgcagctgatgtgtcaaagctacatgttgaagaaaaaaagcactcatattctacaaaagatggccatgatactgaaaaattaggttttggagaggcaacaca

SEQ ID NO: 7102 - DNA, 273 bp, Glycine max
  Clone ID: 701099436H1
gtttcttcttcttctctgttctctgttctcttcctcacaacataagacagacatagtttcgtggctgtggctctgtttgcgctgttgttgggctttgttgatgcgaggtttgtggtggagaagagcagtataactgttctgtcacctcataagctgagggcgaatgcgatggcgccatcggaaacttcggtcttcctcactacggaggattcatcgttggctctgtgctgcatctcaccaaaggctcccacgggtgtcaggtcttcgagggcg

SEQ ID NO: 7103 - DNA, 271 bp, Glycine max
  Clone ID: 701099437H1
gatgagcacaagagtttgtgcagcaaatatggagtctctgggtacccaacaattcagtggtttccaaaaggatctcttgaacccaaaaagtatgaagggccacgcactgctgattcacttgctgagtttgtaaatacggaaggaggaacaaatgtgaagattgctacagctccttccaatgtagtggtgcttacatctgaaaattttaatgaggttgtcttagatgaaaccaaagatgtcttggttgagttttatgcaccctggtgtggac

SEQ ID NO: 7104 - DNA, 272 bp, Glycine max
  Clone ID: 701099438H1
atcgagacgctataaccaaaggacattctttgcgaaacccttgatctgagaaaaagtaccaatggggacgccctctaagacgtaagttctcaacgaattttcctccgaagaggaacacgacgaggcctccgccgccgcgccaaccacgacatcgaagatgacgacgaggagctcgaagcggtggctcgctacgttagctccgatgacgacgataattcgccggatgaagccgctgaagacgacgacgaggataaacaggatgagagtaatgt

SEQ ID NO: 7105 - DNA, 268 bp, Glycine max
  Clone ID: 701099439H1
cccaaatccgtacccaacggaagttttggatttggattgttgtgctctaaaccataatctctgcaccttctactttcttgttccttcttcggcttggatgttttgtgaaacaaaaaagggttattgttgagaaacctaaacctatcctaaaccatggcgcataggttgctgagagaccacgaagcagacggttgggagcgctccgatttccccatcatctgcgaatcatgcctcggcgacagccctacgttcgaatgacaaaagcaga

SEQ ID NO: 7106 - DNA, 268 bp, Glycine max
  Clone ID: 701099440H1
agaccataaccttggaggtggagagttcagataccatagacaatgtgaaagctaagattcaggacaaggaaggtatcccaccagaccaacagaggcttatctttgccgggaaacagcttgaagatggaagaaccctgctgactataacatccagaaggaatctaccctgcacttggtgttgcggcttcgtggtggcatgcaaatctttgttaagactttgactggaaaaaccataactttggaggttgaaagttctgataccattgat

SEQ ID NO: 7107 - DNA, 266 bp, Glycine max
  Clone ID: 701099441H1
aggcgaattccaactgataaaaagaatattcagagaattccaaagacagagatgaatgtcattaaggaagagcaacaaccagaccaaatagctggccacaaagaacttggtcacaaaagtctccttcagagagatgcactctaacagtacatacttgagaccagtgtgtacccaagagagcatgagagcttgaaggagctacgagagttgacggagaaacacccttgagaactgatggctacaccaactgacgaagctcaacttct

SEQ ID NO: 7108 - DNA, 265 bp, Glycine max
  Clone ID: 701099443H1
ctaaatcatactttacattgtgcactctaattcccttgttttgtttacccacatttgtgagactatattatattggagcatatatcatgggtctgaagtttacacatggagtggtgatattaattgttataaggcttcaatgttttcagtgagcatggccaacaaggattggtcctttggtttcaactacactgattggtggtctagatttgggaatcatcctcaaaacaaaacacagcaacaacccaggcaaattctcgtgggt

SEQ ID NO: 7109 - DNA, 274 bp, Glycine max
  Clone ID: 701099445H1
tcagatctcacaacgcgcgtcatcacctaaagccgccggcaccggtagatggaggacgacgagaagaccacccttggtgggagaaatcgaggaggtggacgcgagttccgtggagtaggagggcacgagcgagcgggagaagcgcgtcgcggaccaaggtctcggaggcagagatccacctgtatcggcaggggaagggccccgtggcggtgttcaagtcggcactgggcggctgggagcaggatcagctcgagatcagggaggacatcctcga

SEQ ID NO: 7110 - DNA, 192 bp, Glycine max
  Clone ID: 701099447H1
actagcttgctaggtctcaaacagagagagccatactgcagtctctggaccatccacatctacccattttatatacacactttgagaccgacacattctcctgcttggtgatggagtgttgacctcgtggggactgcatgtacaaatgtaattacctactgcgaagtactcttctgagatttctgccaggat

SEQ ID NO: 7111 - DNA, 275 bp, Glycine max
  Clone ID: 701099448H1
cacggttctctctctgaggttaattgttataacgatagagtattgagcacgaggaggctatgacacagcagagtaccgatggatactggaacctgcagatcgtgatgctgttttggccaatgttgccatcaagagtggcaaaactacaatgtcattgtggaaattgccactatcctctccccggaagagcttttggcggttagacgcgcctatctcaaccgctacaagcactccttggaagaagatgttgcagctcatacctctggccatctacg

SEQ ID NO: 7112 - DNA, 283 bp, Glycine max
  Clone ID: 701099449H1
cttctgtttctctgtcttcattttagtttttacggctagaagaatgtccagctcatcggaatatttggcattttccggccaccacccggcgaactctccggcggaaaagtccactttctctcagacttgcagtctattgagcaatacatcaaggaaaagggtaccttcggagaccttaccctcgggatgacttgcactgccgaaacaaacggttcccctgagacatcgtgtcactctgcaacaaccatggagttgtttcccacgatcatcacgcaacggaacc

SEQ ID NO: 7113 - DNA, 268 bp, Glycine max
  Clone ID: 701099450H1
gcttctcactgatctccattcccattccatggcttccactgaatcatcccctttcaagaaaattcagattcaaagggatgacactacatttgacgcatatgtggttggaaaagaggatgctcctggaattgttgtgattcggagtggtggggtgtggattacgaaattaagaaccatgccgtgaagatttctcagcttggtagtgggtttaaagctcttattccagatttatacagaggaaaggttggtctggatgttgctgaagctc

SEQ ID NO: 7114 - DNA, 274 bp, Glycine max
  Clone ID: 701099451H1
gtccatcacaccaaaccaccaagtggcatcaatctttgcagcagcattctatggactctttaatctcttctctggtttctttatcccaagaccgaaaattcctaaatggtgggtgtggtattactggatttgtccagtggcatggacagtgtatggattaattgtctctcaatatagagatatagaggaccatctttttgtgcctgggagtactactcaaaatttcactgtcaaaggatatattgaagaccactacgggtttaaatccgacttc

SEQ ID NO: 7115 - DNA, 260 bp, Glycine max
  Clone ID: 701099452H1
ctcgagccgcggcacttgacaccttttatgagcaatttgatccagattttatcaacatacaggacaaaggctcgtgaagttctgctaagggcagatgacctgaatgacattgttcagcttgtgggcaacgctgcgttactgaaggagataagatcaccttagagactgcgaagcttttgagagaggattatcttgctcgtaatgcctttacagcatatgacaagttctgcccctactactagtctggttggatgatgcgc

SEQ ID NO: 7116 - DNA, 272 bp, Glycine max
  Clone ID: 701099453H1
cgccgagcaggccgagcgctacgaagagatggtggagttcatggagaaggtctccgccgccgccgacaacgaggaacttaccgtggaggagaggaacctcctctccgtcgcctacaagaacgtgatcggagcgcgcgcgcctcgtggcgcatcatctcctcgatcgagcagaaggaggagagccgcggcaacgaggatcacgtctccgtcatccgcgactaccgatccaagatcgagtccgagctctccaacatctgcgacggtatcctcaa

SEQ ID NO: 7117 - DNA, 272 bp, Glycine max
  Clone ID: 701099454H1
aaccagccccagactctcatgataagtgtgtatttttaatcaagcacggaactttcattgtcgtgaattcaaaattcacacttatcatgagaatgtgacgcaaggtatacatgaagattttgcatctgcccatgtagaaattaagattttgcattccagggaatgttcttctaaaacttataccaagcatgaaaatgacattcctaagctcacatcctcggaaatctttacatactttgaaacaaacatctcctaaagatttgtagatgttg

SEQ ID NO: 7118 - DNA, 270 bp, Glycine max
  Clone ID: 701099455H1
ctagaactcacaaaggacagaagaaacgcgaatgccaggagaactccaattaccacccgggttcagattccaccccactgacgatgtgcttgtgaatcactacttgtgtagaaagtgtgctgcacaaaccattgctgttcccatcatcaaagaaatcgatttgtacaagtttgatccatggcagcttccagagatggctctttacggtgagaaagagtggtacttttgctctcctcgagaccgaaaatacccaaacggttcgagaccgaa

SEQ ID NO: 7119 - DNA, 266 bp, Glycine max
  Clone ID: 701099456H1
gagtcttcttccccaatatcgttagccgttagggtttacggacagagagagagggctgcgctgcagctgcagctgcacctgcagaatcttttatcagcgatagcagcaatgtcttcgtcgaaagctgcagacccagcctgggttacctgactcgcaaggacacggaggtgaagcttccgcgtccaaccagggtcaagaacaaaacccccgctcccattcaaatcaccgccgagcagattctccgcgaagcacgtgagcgtcaagag

SEQ ID NO: 7120 - DNA, 84 bp, Glycine max
  Clone ID: 701099457H1
gagaaagagagatgtctggtatcgcccgtggacgtcttgccgacgagcgaaagtcatggagcaaaacctaacctgatggtttcg

SEQ ID NO: 7121 - DNA, 257 bp, Glycine max
  Clone ID: 701099458H1
ccttgctcttgtttgttccttttattgtttctttcttgatcatgtcgcttgttggtaaaattagtactgaaattggggttcatgcaactgctgcaaagtggttcaacctctttgcaacgcagctccatcatgttcaaaaccttactgatagagtgcatgaaaccaagctgcatcatggtgatgactggcatcacaacgagtcgatcaaacactggacttgtacaatagatggtaagattacaacatgtctgccgagt

SEQ ID NO: 7122 - DNA, 266 bp, Glycine max
  Clone ID: 701099460H1
gttttgcaaaaatgggagttccagagaaagaccctctttcccaattgagtttgcctcctggttttcggttttaccccaccgacgaggagcttctcgttcagtatctgtgccgcaaggtcgctggccaccatttctctcttccaatcattgccgaaattgacttgtacaagttcgacccatgggttcttccaagtaaagcgattttcggtgaaaaagagtggtactttttcagccccagagacaggaaatacccgaacgggtctcga

SEQ ID NO: 7123 - DNA, 267 bp, Glycine max
  Clone ID: 701099461H1
atcattctcatatcctcaatcaccccccctcgcactcgctcttcccttcctctggtggcgacaatgtcgactcctgctaggaagaggctgatgagagacttcaagacgctgcaacaagacccgcctgcagggatcagttgtgctccccaggataacaacataatgctgtggaatgcactcaacttttgtcctgatgatactccatgggatggaggcacgttcaagttgacactccaatttactgaggactatccaaataaaccaccg

SEQ ID NO: 7124 - DNA, 269 bp, Glycine max
  Clone ID: 701099462H1
ctaaatcgtggcctcgtaaatcaaccaaagtgatcgaacttcacaaatcctaaaagccatggcccaatcccatggatccatcctcactcgatcagtgtggtcctccaatctggaatcggagttcgacttaatcgatctgtcatcgactccttccctctcatctcgatggacaccgagttccccggcgtcgtcgtgcgccccgatgcttgcgacccctccttccgccatcgccaacccgccgcgcactacgccgtgctcaaagccaacgt

SEQ ID NO: 7125 - DNA, 229 bp, Glycine max
  Clone ID: 701099463H1
cggctcgagattttatagtagtgcttctcaaaatttctagaacccacgtcacacgtactctgggaaggatagtcttggaaaatgcctggttccgtattatataagagtctcgccctagaatcctcgaggaggagaatttaatacactgtactttatccatttgtgtggggaattatggtaattgattttgagggtttgactactcatggattatgatggtatgagaaaa

SEQ ID NO: 7126 - DNA, 270 bp, Glycine max
  Clone ID: 701099468H1
cattcttcttctgcgttgaattgggacaacgagaaattggatctcagtttacggcaggaaataaaaattgcatttgagtgtaaaataacagagtatagtgtagggccttgttcttgatactgtgctaaatttgttggatggcggagaaatcatgcatcaagcgccttcagaaggaatatagagccctttgtaaagagccagtttctcatgttgtggctcgtccttctccaagtgatattcttgagtggcattatgtgttggagggaagtg

SEQ ID NO: 7127 - DNA, 239 bp, Glycine max
  unsure at all n locations
  Clone ID: 701099469H1
gcgacttacagcattggtgtatatggtttcaagggaattactaagtataaaatatcagtcatggtccaggataatttcaaccaaaatgttggtcagcaagcatcatcttccatgtcatctatggaactggatacgaacaatgtaggaactgcaagcattatatacccggcaggactattgcactacatgaagcttactgtagcangcacaatgttgtctgtcagcatgcaggctgtgga

SEQ ID NO: 7128 - DNA, 264 bp, Glycine max
  Clone ID: 701099471H1
cgtcgttcttttgcgtttgactctctctttctctttctgtgttcttcgatttcttatcctctcatatccgtgatctctctctgttcccttcttctgtctcatgcacacaccactgtaccttgttctcaccgaaccttcaactaggaatcgatcgagagtgtcttgtgttgctagtgcaagaggctgcaatatagatagatacgttcgtgcgtacgtaggaatcgtacgtacgcggtagtacacaagacacgacgccgttttgca

SEQ ID NO: 7129 - DNA, 262 bp, Glycine max
  Clone ID: 701099472H1
tggcaagactggttctcactttgaccctagcagtgacttgttcgttcccaatgaaagaaaagatgttattacttccacagcttgttgggctgctatgttgggattgcttgttggattggggtttgtaatgggtccaattcaacttcttaagacttatggtgttccctatgttatattcgtcatgtggttggatttggtgacttatttgcaccatcatggccatgaagacaaattgccttggtatcgtggaaaggaatggagc

SEQ ID NO: 7130 - DNA, 268 bp, Glycine max
  Clone ID: 701099473H1
ctagaatatcaaattggtctcttgtcttcctcctcatctctacactactccacatagagcccagcctctcaagcccaagcccaagcccaagcccaagcccgttcataaaatcctcctgcagcagcacccagtacccagccctctgcgtctcatccctctccgtctacgcctccagcatccaacaggaccctcaccaactggttcagacagcactctccctctccctgaaccgcacccaagccaccaaaaccttcgtggctaactgcaa

SEQ ID NO: 7131 - DNA, 265 bp, Glycine max
  Clone ID: 701099476H1
cagtaatttacataccctagttctcgtatatattcttcttctttgcatcaatcctttgtctcaaattaaaatcatgggaattgtcactactgaatgcgagcaagtttgtgccgtggctcctgcaaggctatacaaagccatggccttcgattttaacaacgttatgccaaaagctatcccaaattttgttaagagtgctgaaatcattggagacggagggccgggatctattaagaagctcgttcttgttaacggatatgtgaat

SEQ ID NO: 7132 - DNA, 261 bp, Glycine max
  Clone ID: 701099477H1
ctcgagccgctcatattaattagttagcaaagtctcactacaaacattcccttctgttacattaattgtgaccttaagcttttatattgaaccgtgtcaatggccgttcctgtgaggactttagctcttgttgctttgcttgttgccattaatgcaatggtgtgtgaaagtagagtggtaagaaaggaccttggtttggaccttggtggggtgggaattggggtgggtgctggggttggattaggccttggtggtgcaggt

SEQ ID NO: 7133 - DNA, 269 bp, Glycine max
  Clone ID: 701099480H1
tgtacgtttgggactgtgtaccatggaaaatggagaggatcggatgttgcaattaaaagaataaagaaaagctgcttcgctggtcgatcttcagaacaagaaaggctgaccatagagttctggcgggaagctgcatactttccaagcttcaccatccaaatgtggtggcattttatggtgtagttcaggatggaccaggagcaacactagcgactgttgccgagtacatggtggatggttctcttaggaatgttttgcttcgtaaggat

SEQ ID NO: 7134 - DNA, 285 bp, Glycine max
  Clone ID: 701099482H1
tctgagctcggctcgaggaagcatccagtcagttgcatgtacaaatttcagctatgccagatatcgtggtgtaaagatagggtgataatttcattcctacaggcaatgactcaggaaaagttttccccttggaagcaccatatcctattcctttgcagccatttgagggcaatttgcatgctaatatatcagatgcttcagctacagctgctatatcagaagggcttcatcctgcattaccatcatagaacaagggtaagcaccagcagtctgaagatgctcttc

SEQ ID NO: 7135 - DNA, 271 bp, Glycine max
  Clone ID: 701099484H1
tgaatttcatcgacggaacaaccacgtttaagactgccactgttgctgctgtgggtgatggatttatagctcaagacatatggtttcaaaacacagcaggcccacagaagcaccaagcagtggctcttcgtgtaggcgctgaccaatccgtcataaaccgctgtcgcattgatgccttccaagacactctctacgctcactccaacaggcagttctaccgagactcttttattactggcactgttgactttatatttggaaatgcagctgt

SEQ ID NO: 7136 - DNA, 265 bp, Glycine max
  Clone ID: 701099486H1
cgaactttcgtttgcggcaaggcaaatctgcattgcgatggcgcctccgaagctcttcgacctttgcgctctttgtaaccctaattttcgccatcgttggggccgaagacgatatttccatcgaaggaagcatccagagcctgatacctccgccatcaggatccaattagatcaactcaattccaagatccaaattctcgagtctcaaatcagcgaaaagttggaagaagtgaagaagaaggacgaaattatagcagacaaagaa

SEQ ID NO: 7137 - DNA, 267 bp, Glycine max
  Clone ID: 701099487H1
ccgtttttctcttcttcttcttcttcgcataatagcagcacaaatggtgaagcactacagacccccggggaagaaaaaggagggaaatgctgccaaatttgtcattaggtcacaagcaatcaagcagcttcaaatcagtctaccccttttcaggaaactatgtattttgaaaggtgtaactccaagggagcctaagataaagttcaagggaactcatcagacttattaccatgtcaaggatgtttccttccttcatcacgagccttt

SEQ ID NO: 7138 - DNA, 266 bp, Glycine max
  Clone ID: 701099488H1
atcactttatgactccctcagaaacgcaaatcataaaccgccaaaactcgttgacctagactacaacggcgttgaagaccaatcctcaacacaagaacaaatatcaaccaatctcaacaccatgtaccggcactggtgtcaagttcaaagactccaacgctcttcttcggtagcccttaccgtgcaggagaagatagtgatcccggtggtggcactgtggagaacattcctcacggtccggtccatatatggaccggtgataacac

SEQ ID NO: 7139 - DNA, 258 bp, Glycine max
  Clone ID: 701099490H1
cattaccataacctccgacacccgacccctaatcctcttcgagaaattcgggttcacctacccaggccgtgtggcgatcgcggcgtcgtcggtggccgtggtggcgccgtcatcgcaaccgaacctctcgcggctagggttcttcctaataagcgaaaaatcccttccccaatttataatagaaatggaacaaaaccctaccttctgcatcctcaattccccttacacctctcaactcttgcacttcctcgatcttcc

SEQ ID NO: 7140 - DNA, 259 bp, Glycine max
  Clone ID: 701099491H1
ttcctttggttttactttatctttcttccaggaaagtgatgagaatatatacctttttttgcgttttataattttcttttcctttgttctcctttttttcctctcttctgccctccacacaacttctctcccgtctctctctctctacaaatcttctttcttctcttcgctgctcactgtagcgtagcatggctttcagagttggaggagcgggaggaggaaatgcctcttctggcatgggtgttgctgagcatagcgt

SEQ ID NO: 7141 - DNA, 168 bp, Glycine max
  Clone ID: 701099492H1
gtagaaacttaatcgatcatcacttcacttcactaatacatcatggcagacgagacccagcatcagtatgacagctctgctgtcgaggtccacgatcgcggtgtttttgagtttctcggcaagaaaaagatgcagacgataaggctcatcctcaggaggacgtcatcg

SEQ ID NO: 7142 - DNA, 264 bp, Glycine max
  Clone ID: 701099493H1
gtcaattccaacaacaccacaatgggaagaagaccggcgaggtgttaccggcagataaagaacaaaccgtacccgaaatcccgtttctgccgcggcgtgccggagccgaagatccgaatctacgacgtgggaatgaagaagaaaggcgtggacgagttcccgttctgcgtgcacctggtctcgtgggagaaggagaacgtctccagcgaggctttggaggcggcgcgcatcgcatgcaacaagtacatggccaagttcgccgga

SEQ ID NO: 7143 - DNA, 145 bp, Glycine max
  Clone ID: 701099494H1
cgggttgtttcgttgttgtggatctatgttgtatcctctttctcccacaaaatttagtgacatactgaatttggtctgatatgacatgattttgattttgctgagtctctgattggtactgttgcatggacagacgccaactgct

SEQ ID NO: 7144 - DNA, 265 bp, Glycine max
  Clone ID: 701099495H1
ttcaaggaacttttggatacatggaccctgaatatttccatactagtcaattaacagataaaagtgatgtctacagctttggagtggttcttattgaacttttaactgggaaagagccaatatcttctgcacaacaacaagatcttagatgtttggcttcatatttcctccatacagagaaggacatatgaagccaaacttctaagctcttgtcgtttggcttcatatttccttctctgtatggaggaaaatcgtctttttgata

SEQ ID NO: 7145 - DNA, 253 bp, Glycine max
  Clone ID: 701099501H1
ggcaaaccctactagccaggtgtcggttatagggaacttggtgtctgctcaagttgttgcagaaattggctggaaagagactgcagttttaatgttctcactcggattggtatattatctaattatatttgtaacgctgtatcagcgtctgacaagtggcagccagttccccacagtgctaaggccaacttacttgtggttttttgctgcaccaagcatagcaagtctagcctggaaatccatcacaggtgtt

SEQ ID NO: 7146 - DNA, 119 bp, Glycine max
  Clone ID: 701099502H1
ctgaaagtcagacaaaatactgatcaaagagcataatgtcagggatcattcacaagattggcgagacccttcatgtgggatggcacaagaaggaggaggagcataagggtcagcaccat

SEQ ID NO: 7147 - DNA, 257 bp, Glycine max
  Clone ID: 701099504H1
tctctgttttctttcattcccattcttagttttccctgccattcaaattttcacatgacctctcattattattctttttattattattagttcttttttgtttccatcaccaaccaacctctcatctttggatggtgaattccccatctgagttcctttgatctcttcgccttctctcaatttcttcttctctgatcccagcaaagaaaagaaaaaaaaaacaaactaaaaaaaacattagaaacaattgttttttt

SEQ ID NO: 7148 - DNA, 268 bp, Glycine max
  Clone ID: 701099505H1
actcgagccgattcggctcgagcacacatcaccaagctgtatcaagaccatcaatccctcaacaactccaccactagcagcaacactcgatcctccagacaagagcaaaactatccacacccacaagaacacgacgaagaatgcttcaactttttcatggcagatgaagacttatcctcgtcttcttccaagcactactatccctatcaaccccaccctccctccactaccgaccattccttctcccccactccggcgtcgacgttgt

SEQ ID NO: 7149 - DNA, 265 bp, Glycine max
  Clone ID: 701099506H1
cagaagctagtttccacgattttcggatcgacaagtcaaaagagcgatatttcactcaccagagaagaaccacaacaatggcggatcaactcaccgatgaacagatctccgagttcaaggaagccttcagcttgttcgataaggacggcgatggttgcatcacaaccaaggagcttggaactgttatgcgttcattggggcaaaacccaactgaggcagaactccaggacatgatcaatgaagtggatgctatgggaatggtacc

SEQ ID NO: 7150 - DNA, 264 bp, Glycine max
  Clone ID: 701099507H1
acatggcggaagctcaaccagcttccgctcttccctcaggtggccaatgttgtgttgtccaaggctgcctattgcaccgagaagtacaacatcccggttgtttcctctgctgagaaaggttacagggtttctgcttatcttcctttggtgcctactgagaagatcgccaaagtcttcggtggaaactgatctcgatctattgcggttttgaatttcttattgtttttactttctctacaaagtgttgtgctagttgctactgtt

SEQ ID NO: 7151 - DNA, 264 bp, Glycine max
  Clone ID: 701099508H1
caacaattagttaagagagttgagtaagatcagaatggcagacttgatgaaaagaatcctccaaatgattgaggctgaacaagcaagcaaagggtccaaccatggttcttcaaactcacataacactctatggcagcggaagccagaatggatcaaccatcaacagtggcaatcatcttaacaacggcaacaggtatgacgactcataccactacggtgaacgccctatttataacagtggcactttcatggtaatggcaacgg

SEQ ID NO: 7152 - DNA, 263 bp, Glycine max
  Clone ID: 701099509H1
cagagatatttttttattataaattcaaactaataataataatgccttcttctcttcactttgataggttcaatcctatcacccacgccgccaccactgtcgccatcgccaacggcgtaaactgtccgaagcagcctcaagcgccgccctcttccacggcggcgcgtcgcctcgtggttccctctctctcttccggcagagcaatcgcggcccccgacacggtggcgctccaccacgcgcacgtggtggccccaaccagtgct

SEQ ID NO: 7153 - DNA, 257 bp, Glycine max
  Clone ID: 701099510H1
gcttgtgctgccttcgtttgcgtttttatcacagaggaattaacatatatatagcaagcatggcagtcacactctacgaccttagctcttcctctgggttgaacaaacttgatgagtaccttctcccacgcagttacatcaccgggtaccaagctacaaaggatgatcttactgtttatgcagctttgccaactgctccatcagatgaatatggaaatgtttccaggtggtacaagcacattgatctttgttgagaa

SEQ ID NO: 7154 - DNA, 116 bp, Glycine max
  Clone ID: 701099511H1
cggctcgagaattgaactaattgacctagcaaacttctcattaatcgctatagtgctagtgatcaattgcaattttgaataataatgactttctattcactacgttataacgtgtt

SEQ ID NO: 7155 - DNA, 259 bp, Glycine max
  Clone ID: 701099512H1
catacacacactcaaatacatacactagtagtgtggtgtgtgcccttcctttatccttttgctttttgtgtgcaattaacacacactcacacaaaaatgacggcatgccaagattggccagagccagtgattcgagtccaagccttggctgcaagtggcttagccacaatccccgaacgtttcataaagcctaagtcccaaagacccactaatagtaacaattatgctccaaagaccaattccttcaaattggtcatca

SEQ ID NO: 7156 - DNA, 255 bp, Glycine max
  Clone ID: 701099513H1
gttgtaagactttgtaattgaggtgctgcaatggcttcaagtcaggaagaggtgactcttttgggagtaattggaagcccatttgcttgcagggtgaagattgcccttaagttgaagggagttgaatacaaatatgtggaagaaaatttggccaacaagagtgatttgcttctcaaatccaacccagttcacaagaaagttccagtttttattcacaatgagaagcccatagcagagtctctgtgattgttgagt

SEQ ID NO: 7157 - DNA, 257 bp, Glycine max
  Clone ID: 701099515H1
ggtgaatttgtctgccctagagcgccttgttagtaggtgtcccaacctgcagactctccgcctcaaccgtgctgtgacgctagacaggcttgccaaccttcttcgcggagctcctcaattggttgagttaggcacgggaacctacacgactgagatgcgaccggaggtcttcacaaacctggcggaggcattttctgggtgcaagcaattgaagggcttgtctggattttgggacgttctccatcctaccttccagc

SEQ ID NO: 7158 - DNA, 88 bp, Glycine max
  Clone ID: 701099516H1
cagagacagagacagagagagaggatgggttgttgccaatcatcgatgttgctgagagtgggagagagggagactcaccctgaaaagg

SEQ ID NO: 7159 - DNA, 262 bp, Glycine max
  Clone ID: 701099517H1
atttggttttggtttctccgaccttgaacgcttcccatcttggtgagtaacacgaatctgaggaaaaaaaatgtcgattatgcaactttacgggcgcagaagagcgtggtgaagcggtcgaagaagtacttggaagaagcgctttacatgaagctcttcagagatggaagctcccagctcatcgttcgccagagcctcaacaacttcgtcaagagccggaagcgcgtttacagatgggacgtaggcgacactcaagaagctt

SEQ ID NO: 7160 - DNA, 265 bp, Glycine max
  Clone ID: 701099518H1
ggaatggtcatcaacgtggccaccctattggccgggaccgttacaaacccttgggggaatggctacttccaaggacccaaagaggctcctctcgaagccgcttccgcttgcacagggctgtacggcaagggcgcttaccctggctacgctggggaactcttgctggaccccactaccgccgctagctacaatgctaacgccgtcaatcaccgcaaatatttgttgccggcactctttgaccctaccacttcgcttgttctactct

SEQ ID NO: 7161 - DNA, 265 bp, Glycine max
  Clone ID: 701099519H1
cttctttgtttcttattgagtttttggcttctcacttctttttttctttcacactctcaacgaagtggtttataacagtgtttaattgaaattccaaacatggattgggttcgaggagacgctgtcggacgaggaagctttgctaccgttagtttagctattccaacgacgaattacaatcagtttccgtctctaaccgtggttaagtccgctgacgctcaaacctcgtgctggctcagaaacgagaaaacgtgctggatcgcct

SEQ ID NO: 7162 - DNA, 247 bp, Glycine max
  Clone ID: 701099521H1
caaattcttattagaacgaaaaaagaaaagaaaagaaaaaagagcgatttttccctcaccaaagaagaaccaaaacaatggcggatcaactcaccgatgaacagatctccgagttcaaggaagccttcagcttgttcgataaggacggcgatggttgcatcacaaccaaggagcttggaactgttatgcgttcattggggcaaaacccaactgaggcagaactccaggacatgatcaatgaagtgga

SEQ ID NO: 7163 - DNA, 264 bp, Glycine max
  Clone ID: 701099522H1
ccagttctggttcctgtcaacgccacaagtaccgggctagaaagtgctggtctggacaacataacttcgagtgacattgataaactctcaatttcaaatgtccatagtacatctgaaaggtttctaaaccatcatgctgtgctgttacagttttgctgctgaatctttgtgttatttagtgcattagtttctaatccaatattgtagctcagttggcaacatgtgctgagtttgtggagaaggacctggttcgatactcgcaaa

SEQ ID NO: 7164 - DNA, 261 bp, Glycine max
  Clone ID: 701099524H1
attggaaccccttgagcaggttaacgtttcaaaccattcgaatgcaagccttgaggttggcgtatctcctccttccctggtggttggtgttttcgacagcagaatcggcgtgcaaggagggctgtggagtggcactaggctcctactacttatggcggggctccaacctcacctacatctcctccatcatggcctccagccttctgacaactccggacgacatagtcaactacaactacgacaccgtcccagcaaggacat

SEQ ID NO: 7165 - DNA, 259 bp, Glycine max
  Clone ID: 701099525H1
cggctcgagcggctcgagaaaaactacatcttagctgagagagctgagactttgttgttttgattgaagcaacgatatcctgaactttcacaaacatcattggacacatgcaaaattcaatacaaccaggatgcaggaaaagcgatattagaaagctactcaagagtattagaaggcttagcattcaacattgtagcttggattgaagatgttcttcttgctgataaatcaatgacgaaccaaaattataggaatcgcg

SEQ ID NO: 7166 - DNA, 256 bp, Glycine max
  Clone ID: 701099526H1
cagttcattaaactcgttttttgctagaagcaggaagataagagaaacaaacaaaccacaaaataatcaattgagctacttactataagatttagatctcccaacagagagtttcacaaaattgccaagtacccttttcaggatcaagaaagagaatcaaaaaccaacaaaaggtgttgttcattgttgtagttgtttgtaactgtagcaacaggaagatggttggaaagttggttgtggtgaggtgtgttggcca

SEQ ID NO: 7167 - DNA, 262 bp, Glycine max
  Clone ID: 701099527H1
actcgagccgctcgagccgattcggctcgagggaagtgataagtgctaaaacagagtttcgaccgaatctacactaaaaccctacgcacacatcttggagtaagtccaatcgatatagcagcaatgtctacgcttgaacttgaagctcgagatgtcatcaaaattgtgcttcagttttgcaaagagaattcgttgcatcagacttttcagatgctgcagaacgaatgccaggtttctctgaacactgtgacagaattgaaac

SEQ ID NO: 7168 - DNA, 257 bp, Glycine max
  Clone ID: 701099528H1
cgcagataactccattaccttattttctccatacaagatggggaaattcaacctctctcatagggtggtattggctcccatgaccagatgcagagccctcaatgggattccattgccagcgcatgatcaatactatactcaaagatcaacactaggtggattcctcatcactgaaggcaccttgatctctcccacttcttctggatttcctcatgttcccgggatatattcagatgaacaagtaaggcatggagaaa

SEQ ID NO: 7169 - DNA, 257 bp, Glycine max
  Clone ID: 701099529H1
gccctttcttctcttcccccattttttcctctttcttcctcgcctagctagctccagaaaattaggatctgcttcagttctagtgtttccctgtcccaaatcacgagtccattgagtttgattttgtggatgaaaagcatagatagggcttttgcaaaactctccaatgtttcttgaaattatatgaccatgcgtcgaattcgtatgctgcactccttctccgtcgtgttcctctactggttcacgttttctcatga

SEQ ID NO: 7170 - DNA, 257 bp, Glycine max
  Clone ID: 701099530H1
actgcatattgattacccaatgttgtttgaactccgtaatgatgctgccgagcgggtttctcattgtggggttctggagttcattgctgaggaaggcatgatatacatgccatactgggtaggcattcaaaaatgatggagaacatgcttttacaagagggggacattgtcaaagtgaaaaatgtgacacttccaaaggggacatatgttaagttacagccccacacaaaagactttccagaatttccaatccaaaa

SEQ ID NO: 7171 - DNA, 230 bp, Glycine max
  Clone ID: 701099532H1
ctggtttttttctagataggggttgcactttttaaatcagaactagcccaagacccaggtacagaaagtactgtgttagttaaaaaaaaaaaaactttcatcaattattatcaactttattcggaagtgtagccttgtaggtgaactatgtgtcaggattttgaagtttgattctctttaatattgattgaatagttgtgtgtagaaactagaaaggttagtgattatta

SEQ ID NO: 7172 - DNA, 263 bp, Glycine max
  Clone ID: 701099534H1
ctctctactactgctagctgtgacttgttttgagttcgatccaattgcattggtatgtggaatcaggaaagatggttagcgtagctgagatcaggcaggcacaaagggcagaaggcccagcaaccatccttgccattggaactgcaaacccaccaaaccgtgttgatcagagcacctatcccgattactacttcagaatcaccaacagtgaccacatgaccgagctcaaagagaaatttcagcgcattgtgacaagtctatga

SEQ ID NO: 7173 - DNA, 110 bp, Glycine max
  Clone ID: 701099535H1
aagctcttggctgagaagacgaagaagaagctggaggaagctgcacattcatttagcgttgatggcgtcatcaaccatccatccccggtcaaacgtgatgtgaagtggaa

SEQ ID NO: 7174 - DNA, 260 bp, Glycine max
  unsure at all n locations
  Clone ID: 701099536H1
cgctgatctcagcaggaacaatagcagcgagagcagaatcgacagcgactcaagnctgcttccgaggcttgacacgtggtacaaatccaaggacgtatcgcagaggatccttctctcacttgaatgccaaatgaggaggtgttcctacacgcaggttttgggtgagccgaacctaccgggcaaaccgtccctgctctacgacctcgtgtgtaagccgaacgtgatccacgcgctgaacgacgagcgtcgatgtagcgcgt

SEQ ID NO: 7175 - DNA, 258 bp, Glycine max
  Clone ID: 701099538H1
cacagatcaattgcaacggttgaattttcactgaagacaaagttacaaaaaaaaaacatgtcttgctccgtcgcggtttccaattcgccggtgttctctcattcttcttccctcttctgctcgaagccctccatcatctcttcttcgccggaatccctctccctctctctgtcgcatctcaaaccttcgaactcttctacgtcgtcgtcttgttcttcgccttctgctgctgctggttcttcttcgcctcttctccgt

SEQ ID NO: 7176 - DNA, 260 bp, Glycine max
  Clone ID: 701099539H1
cggaagagcatttggctgtcaagcacttctcagttgagggacagttggagtttaaggctatcctctttgttcctaagagggcaccttttgacctctttgacacaaggaagaagcctaacaatattaagctttatgtccgccgtgtctttatcatggacaactgtgaggagttgattcctgagtatttgggctttgacaagggtattgtggattccgaagatctaccactcaacatttcaagagaaattgcaacagaacaa

SEQ ID NO: 7177 - DNA, 116 bp, Glycine max
  Clone ID: 701099540H1
ctagatcgcgaggttcgccctttattattttgatgagtactgtaccttgtttagacggtaagaagactctgagatatttcgaattccacaagcagctaaagggttttagtccattc

SEQ ID NO: 7178 - DNA, 261 bp, Glycine max
  Clone ID: 701099543H1
atcaactttgtgtttctctcttcaccttcgtctttctctcatttcaattcttatgcggttcacaaactctgtacagttaatcaagcccaacctcacctcacctcacctcacaggttttagttgttaattaaatatatagatagaaatccaaggaagaagatgaagcagtttgccgtccaaaacgtcgtcgctccatcccacgatgagattagcgtggtttgccccaagccccgccgcctcggcctctcaacttccccgtga

SEQ ID NO: 7179 - DNA, 254 bp, Glycine max
  Clone ID: 701099547H1
ctctcactgatagccagaaggtttatgtagattcattggtgaagcaagcatatgaaaattgggatcaggttgtggattatgatggcaaatcactcgtgaatgctaaaatttcttctgaaaatgaacttcatgtggagtcaattgattatggtagtggtttagatcatcaactgcaactgccggtccttccagtgtctgttccttctgaacagcaaatcaattcagggatacctgttggagttacaacgataata

SEQ ID NO: 7180 - DNA, 246 bp, Glycine max
  Clone ID: 701099548H1
caagaacttgttctactcttttatcctacgcactcctcccttcttatcctgcgcatctttcaccgagatcctccccttcgcatcttcactttccaccatttcagtgggaaagaatcatgagttgtttcagctgttgcgaagaggatgaactccacaaggctgctgaaagtcgaggaccatacgtagtaaaaaatccagcaggaaatgatggaaattatcttgcttctgatactgcaaagcaggaac

SEQ ID NO: 7181 - DNA, 256 bp, Glycine max
  Clone ID: 701099550H1
ctggtggatctcaaattgtgaaccgcacatatacccaccctggttcacaagctacgtctatctcacgttctctctctttctactgtcttgctgaaactgtgagtctatgttatttgtggcggagatgaactcctccaccaacacctcgaattctcagtcaatggctgcagcagccagtgatgggtctgggaagaaggtaagaaaaccttacaccataaccaagtccaggtgacgtttggatgaggcagacaggaca

SEQ ID NO: 7182 - DNA, 258 bp, Glycine max
  Clone ID: 701099551H1
ctctactgctgatgacagctacgaattgaagaacaagcttagagaactcgagatttcgttgttggggcctgattcagacattgttgacagttgccactgctcctacaacggtggtttccacggagcatctccaatggctaaatacaattgggatcagattgtggaaatgattccaaaattaaacttgaaagaagtcctcattcggtgtgcacaagccgtggctgatgatgatattgaaacagcagtggatttatgaac

SEQ ID NO: 7183 - DNA, 261 bp, Glycine max
  Clone ID: 701099552H1
cggaagccttcccgtcaaatggacagccagaagtgacttcagcctggcaaaccccggcagcagagcctgggaaagctgattggcaattggcattggtagagactgctagcaatttgtcaaagcagaaggcagctttaggtggtgggttggatcctctattgttgactggtatgtatgatcaaggaatggtgaggcagcatgtcagcactacccaactgagtggtgggagtgcaagcagtgtggcatgccgggaccagggaa

SEQ ID NO: 7184 - DNA, 261 bp, Glycine max
  Clone ID: 701099553H1
cggctcgagggaggaagctttgagagagagagacggaggagggagagtgttgacgctccatcaacgatgggtatttctagggattccatgcacaagaggcgtgccactggtggcaagaagaaggcatggagaaagaagagacagtatgagcttgggcgtcaggccgcaaacaccaagttatcaagcaacaaaactatccggaggattcgtgttcgaggtggcaatgttaaatggagggcattgaggttgataccggcaatt

SEQ ID NO: 7185 - DNA, 248 bp, Glycine max
  Clone ID: 701099554H1
cttttggatgactttttgctagagaagcaaatgaatgaaacgacagttgaagtgcgtgaaatagaggtgttgaatgattctggaccaagcaattcctcattgctaccatttaaagatgacgaagaagtggacattggtggagatgaacaccctgtgtcgagttatcctcctgtggagattgtgaaggaggaaacttgtaggatgatcacctctgttagacctcgaggcagtgttacagacgctcctgt

SEQ ID NO: 7186 - DNA, 256 bp, Glycine max
  Clone ID: 701099557H1
gaccgtgatcatagcttctggagtttgtcgtggatgcagagatgctatttactttggccttgctctcttatcactctcatggtgtagcaagaacatgaataacttggtcctatctcttgttcctaaattcgcaaaactgcaaactctaatcctccgtcaagacaagcctcaactagaggataatgctgttgagactattgcaaaatgctgtcatgaactgcagatcctggacctcagcaaaagttcaagctaactg

SEQ ID NO: 7187 - DNA, 251 bp, Glycine max
  Clone ID: 701099559H1
tctaaatctcgtccagtactgttgaattaataatattatcattcttacaatatgaaggtatagtctgtgtaccaatttgattagaacctctcttccttctttagataaatgttttccaaaccaatgatgatttttgctccaaattctatctctcaagtagacaaaaatagattttttttcttcttaccaatcatagaaggaatgccaagttattttcttgtccctaggcactctgttactcaatttagttg

SEQ ID NO: 7188 - DNA, 256 bp, Glycine max
  Clone ID: 701099560H1
aatcgagccgaatcggctcgagcggctcgagaaggcatatcttgcactgagctcctattggaatctgttttggtgacggaaaaactgagcatgaaaaccagaaaggaacttctactggatttaaattaatgctttctaagctcttcccaaagctagtagaggcattttctgacaagggaattgattgcagccagtttgctgagatgcataagtaactgtctgttctaccttgttgtgaataacatccagcttcctg

SEQ ID NO: 7189 - DNA, 253 bp, Glycine max
  Clone ID: 701099561H1
ctaaagtttggcaagcttattgaggcaaaggtggttgttgacaagttctctgggcgttctcgtggttttggatttgtcacatttgatgacaagaaagcaatggacgaggctattgatgctatgaatgggatagatttagacgggcgaactattactgttgatagagctcagcctcaacaaggatcaactagagatgatggtgatcgttaccgggagcgtggtcgtgatcgtgatcgtaacgagattatggagg

SEQ ID NO: 7190 - DNA, 250 bp, Glycine max
  Clone ID: 701099562H1
ctgaagaaagacacagccattgtttgtttactttccattgattgagcgaaagctttgttttttctgcgatcattttccattgggtggaagaaagtctcaacctttagtcgaaagagcaaggatctgagtgagtgagcgatcatgtgtggtggtgcgattatctccgacttcattccagcgggtcccgccggcggggcgcacgcgtgaccgccgacatcctgtggccgaatttgaggaaggttctcgaagt

SEQ ID NO: 7191 - DNA, 94 bp, Glycine max
  Clone ID: 701099563H1
cctaatgatcttgtaaagagaagaatttctggtaaaggaccaatttgttcccaatggagttcgccttttgattgaggactaatccttatgcttc

SEQ ID NO: 7192 - DNA, 255 bp, Glycine max
  Clone ID: 701099564H1
ctcactctgaatccgccattgggctgcgatggcgaagaagcgaaagtcggtggcaacgcgccttgacgaagtggatcgaacgatgtactccactttctgcagcacagcccaactccctctctcatctctacacccacgccatgaaccaacaaaaactctcatttcaggccggtgaacgacacgctcttgagaaattgtatcaatggattctcaggcaacagcaagaaggatctagggtggcccattgatattgtt

SEQ ID NO: 7193 - DNA, 262 bp, Glycine max
  Clone ID: 701099566H1
ctctctactactgctagctgtgacttgttttgagttcaatccaattgcattggtatctgaaatcaggaaagatggttagcgtactcgagatcaggcaggcacaaagggcagaagggccagcaaccatccttgccattggaactgcaaacccaccaaaccgtgttgatcagagcacctatcctgattactacttcagaatcaccaacagtgaccacatgaccgagctcaaagaggaatttcagcgcatggtgacaagtctatg

SEQ ID NO: 7194 - DNA, 202 bp, Glycine max
  unsure at all n locations
  Clone ID: 701099567H1
tgcgcttcagcacaatggggtgctacaagtatgtttcggagctatggcgcaagaagcagtctgatgttatgagattcttgcagcgggtgacgtgctnggagtatcgccagcaccattctatgtcgtttgacacgtcactcgccagataagtcgtcgcatggttcaagctagcaggtacgtgatacgtgtcgctacgaggtgc

SEQ ID NO: 7195 - DNA, 258 bp, Glycine max
  Clone ID: 701099569H1
ctcgagccgtctcacgtttttacacacgtagacacatacacattcataattcattgctatacccacacaagcctagctcctcatatcataccactgatttatcttccctctccatcgttcgttcattcattcactctgggcgcgcgcacgtgctaggaaccatcgattcgagaatgggcaacgactgtgtgccgtcgacggcggcggcggaggtcatggcggtggtggccgttgacctcactgacctccagctggtgg

SEQ ID NO: 7196 - DNA, 259 bp, Glycine max
  Clone ID: 701099571H1
attcttctaagctctactaaaaaaagatacatagaaacaatcgaaattatttattattattaaagcaacatggttttgtcatggacaaaagggagagtgttccggcgtgcacgaaagggtaaggagttgaaatattctggtggcgacatggagatagagattgcgatccccacccacttccggtgcccggtaaccttggacatgatgaaggaccccgtgaccgattccacgggcataacctatgccgcgacagcatcga

SEQ ID NO: 7197 - DNA, 259 bp, Glycine max
  Clone ID: 701099572H1
ctcgagccgcttgagccgttgctatgtagctgccactagtactcatcctcatcctcaacctcaagtctctccgtaattagcacctcaactcagattaagacaacatcatcgctagtttgctagctgctaattaacacccattaattcttgttggtcaatactaaacagtactaaacatgggtgtctgctttgcttcgctcgctcgccaccaaacaccctctaaatccattccctacgcaggttcgggcgtgagtccttg

SEQ ID NO: 7198 - DNA, 257 bp, Glycine max
  Clone ID: 701099573H1
agcagcagcgacagttttctacaatttgaagcaaaaacatccaacacttgacatgccagtgatcgactacgacttggcacttcttttccaaccagtgctggtgcttggaatcagcattggagttgccttcaatgtgatttttgctgattggatgatcacagtcttgctactaataattttcgtaggaattgcaaccaaggcattcttaaaaggagttgagacatggaaaaaagaaaccattataagcaggaaactgc

SEQ ID NO: 7199 - DNA, 252 bp, Glycine max
  Clone ID: 701099574H1
caaattctaaacgctattgatagtaaaatggcggattcagtgtcggtggacatggaagccatctctcctccacccgaggaacatgttgttagaactcgtcatggttgtgtctcagttgctgtgtatggggaccaggacaagccagcgcttatcacgtatcctgatttggctttaaattatgtctcctgctttcaggggacattattttgtccagaagcctgttcattgctgctccacaatctgcatatatca

SEQ ID NO: 7200 - DNA, 257 bp, Glycine max
  Clone ID: 701099575H1
cccataggttactactcttcgccttttcctttgcaattgttaccaaacaattcttgcttagcccttacaagcaagcattaacaacaatgaagaaagtagtgttaaaggtgggcttacatgatgatagaatcaagcgaaaagttatcagaacagcatctggtctttcaggggttgaatcagtttctattgacatgaaagacgagaaaatgaccttattagggaacattgatccagtgaatgcatgtgcaagctacgaa

SEQ ID NO: 7201 - DNA, 221 bp, Glycine max
  Clone ID: 701099576H1
tgataaatgaaaatatggatcggttgacattcacatcacttgtccataaatgggttgtatccccaattccccattgagcgcatcggaatcaaagtgtctctctaacctctcgtaaagtccaagggtggacgggtttaactggctagggttttgtcctcaaaattaaaactgtggaactttggttgcaaagtcatagggggtaagttgtgtttgcatggaag

SEQ ID NO: 7202 - DNA, 254 bp, Glycine max
  Clone ID: 701099578H1
ttccttttgaaggttagaagtgctacaatacaaacaatgggaggtactcagggagatgtgaagttttgggtaatgtggggagcccattttgtgtgaagggtcaagattgcccttaagttgaagggagttgaatacaaatttttggaagaaaatttgggcaacaaagagtgatttgcttctcaaatacaaccctgttcacaagaaaggttccagtgtttgttcaaaatgagaagcccatagcgagtctcttgtga

SEQ ID NO: 7203 - DNA, 254 bp, Glycine max
  Clone ID: 701099579H1
aaagaaagaaaggaaaagaaaagctctcttctttgaatatggagtttggttcagaaagatctggtcatgaagtcaaggatgagaagagaagtgaatctagtgttggagatgaagaagatcgtcgtgaacaagagattgttacgcaggagccacccctgtctactaccgaaagatccacactggatgctgggccaaatgcttcttccctaaccaaaaaggaagaggctgttgatgaacttaagttgccaaagccg

SEQ ID NO: 7204 - DNA, 253 bp, Glycine max
  Clone ID: 701099580H1
ctctcccatcacttctgtgtttctctcttcacctacactttcctctttcaattcaattcaattcttctttttggttcagaaactctgtacagttaatcaaaccctacctcacctcaccggttttagctgttaatttaatatatagatagaaatccaaggaagaagatgaagcagtttgccgtccaaaacgtcgtcgttccatcccacgatgagattagcgttgtttgccccaagccccgcgcctcggcctctt

SEQ ID NO: 7205 - DNA, 264 bp, Glycine max
  Clone ID: 701099581H1
ctgacttgcagcaattcccaatggcttccgtttccaagctctcaacgccaaatccacttgcttccttatcagaagcgcttcgcccccgagattctcgcttcctcaccttcaaaccttcttccatcgcttttaatcacaaaactaacctatccgcttccctccgatccattcactcgctccctcttaaaacctccttacggatcaaatgctcccaaacagatgggaatggaagtcctgcaaagaggacatgcttcatgatcttta

SEQ ID NO: 7206 - DNA, 261 bp, Glycine max
  Clone ID: 701099582H1
atttatatctcttgagaaatggcacaagaaacctttctattcacatcttcatctgtaaacgagggtcaccccgacaagctgtgcgaccagatctctgatgcagtacttgatgcgtgccttgaacaggaccctgacagcaaggttgcctgtgagacatgcaccaagaccaacatggtcatggtcttcggagagatcacaaccaaggccaacgtagactatgaaaagattgtccgcgacacatgccgcgaattggattcatct

SEQ ID NO: 7207 - DNA, 259 bp, Glycine max
  Clone ID: 701099584H1
aaacgtgtgaaaatgggtcacatatatggcacggaatttaacggccgattgagcactcatgacagtggtaatggtaatgccaccaggattgaggactctaatgctgttactggcttataaacatcctttttttaactagataacatggaagaactagatttccatggtgcagatgaatacataaagttataaagttatagaaaccatttttcttattcatttgtctgataaacttcagctctacaaactataggctcta

SEQ ID NO: 7208 - DNA, 260 bp, Glycine max
  Clone ID: 701099585H1
aagtgggtctatatcacctgaccttaggaagctagagaatctgagggttcttgctcttcataacaacaacttctatgggacaattccatcagaattgggaaattgcactgaattggagggaatatttttacagggtaattaccttagtggagtgattccaattgaaataggaaacctttcacagcttcaaaatttggatatatcaagcaattccctcagtgggaatattcctgcatcacttgggagttgtataatctcaa

SEQ ID NO: 7209 - DNA, 111 bp, Glycine max
  unsure at all n locations
  Clone ID: 701099586H1
ccgacaacaagtccttaccctctttgcaactacccttccgcaccacagatatcagaaacgccgcntcttccgtttgcaccgcttacgactactatctccgttttgctcaac

SEQ ID NO: 7210 - DNA, 238 bp, Glycine max
  Clone ID: 701099587H1
acaccacatgaggcactcagagagcatttgttgatttggatttggaaggtttttccactctggttacgggataaacttaacttccttgcttctctccttattttccacattgtataaatgataattcagggtacttggtagtagtggtgcttgacaaagatattgaagatgggaattttgagtactattgcaagcttttttggatttggagtgggaacttcaattgggctagtcattg

SEQ ID NO: 7211 - DNA, 116 bp, Glycine max
  Clone ID: 701099588H1
cggctcgaggaattgttgtaactttttgattcctaaattctctaaaattcgagattctaatttcgttaggggaaagagattgtttgtgtgtgagtgagtatggctggaaaaggcga

SEQ ID NO: 7212 - DNA, 256 bp, Glycine max
  Clone ID: 701099589H1
ggcgtgagttcttcaaccagccacttgagatgaaggaagagtatgcaaactcccccaccacttatgagggatatggtagtcgcttgggagtgcagaaaggtgccaccttggattggagtgactacttctttctccattacatgcctccttcacttaggaaccaagctaagtggcctgcatttccagaatccttgaggaaagtgattgctgaatatggtgaaggagtggttaagctaggaggaggatactcaagatg

SEQ ID NO: 7213 - DNA, 255 bp, Glycine max
  Clone ID: 701099590H1
gcctcacagaggttaggaagaatggcacctgtgcttggttgaggccagatggtaagacacaagtaaccgtcgagtactacaatgacaatggtgccatggttccagttcgtgtccacactgtcctaatttccacccaacatgacgtagatgtgagccatgatcaaattgctgcggaccttaaagagcatgttatcaagcctgtcattcctgagaagtaccttgatgagaagaccatcttccacttaacccttctgg

SEQ ID NO: 7214 - DNA, 254 bp, Glycine max
  Clone ID: 701099591H1
cttctctctttcaccaatcaacacaaactaagttcttccttctgatgaaagcgatagcaatggccacgaatccaatcgaagcggggaacggcgacgctgctcccaaccctaacgcgactaccaaatcctccgtgtacctgcaagactcggaggagctgaagcgagtcttcagccgcttcgacgccaacggcgacggcaagatctccgtctcggagttggacaacgtcctccgctccctcggtccggcgtcccgc

SEQ ID NO: 7215 - DNA, 249 bp, Glycine max
  Clone ID: 701099592H1
cagagatagaccaataatctgaatctgaaacctccgtgttggtgttgcatatccaaaccctaatttggaaattgaattgttgaagggaagaagatcaagatggttctggcggagttaggtgggagcatttcgcgtgctctccagctgatgagcaatgcgacagtaatcgacgagaaggtgctcaacgattgcctcaacgacatcactcgcgctcttcttcaatccgatgttcaattcacttgtccgcga

SEQ ID NO: 7216 - DNA, 253 bp, Glycine max
  Clone ID: 701099593H1
agacgccgacgtggcggagctggagtccatgacgaaactctacataagacccggcaacgagcggatcacgtacgatgatttcatggcgctgcacgagtcgctgggtgagacctactttgggttggtccatgtcgaggatggccagcagcaaggttcgatgctttaggtctcgaataaggtgagcaacctgagcagaaactgcgatttgggagtcatggtactcaatggatatcagtggaaatgctcgccgtcc

SEQ ID NO: 7217 - DNA, 210 bp, Glycine max
  Clone ID: 701099594H1
ataatatctttgcaagactgaggctgagttgaaagaagcttggcgtcctggagatcttggttacggaactagagttcctggtgacatgctgattgtcacaattgtcttctgttactctgttattgctcctgtgataatcccatttggtgctctatattttggcctaggatggcttgttttgcgaaatcaggcactcaaagtctatgtacc

SEQ ID NO: 7218 - DNA, 236 bp, Glycine max
  Clone ID: 701099595H1
agatattcaaggatctggtgccccttcttccttcttgtgttgggaccaattctttaatgagcgagagagagagggcgcaatagtagccatagccataatttattgttattatttagggatgagtgaagtgaatgaatgaaaacaaaaacaccgccatcgctcttgtctctcacggttgactctgcggttcttaatctctccgacatctccgatctctcccatgtccctgatcacat

SEQ ID NO: 7219 - DNA, 252 bp, Glycine max
  Clone ID: 701099596H1
gccgttgaggtcaccggtggacctgaagttcccttccatcctggaagagaggacaaacctgagccaccaccagacggtcgcttgcccgatgccactaagggttctgaccatttgagagatgtgtttggcaaagctatcgggcttagtgaccgagatatcgttgctctgtctgggggtcacactattggagctgcgcacaaggagcgttctggattcgagggtccctggacctctaatccttattttcgacaa

SEQ ID NO: 7220 - DNA, 264 bp, Glycine max
  Clone ID: 701099601H1
cgcaaaccctactagccaggtgtcggttatagggaacttggtgtctgctcaagttgttgcagaaattggttggaaagagagtgcagttttaatgttctcactcggattggtatattatctaattatatttgtaacgctgatcagcgactgacaagtggcagccagttccccacagtgctaaggccaacttacttgttgttttttgctgcaccaagcatagcaagtctagcctggaaatccatcacaggtgcttttgtcacccca

SEQ ID NO: 7221 - DNA, 104 bp, Glycine max
  Clone ID: 701099602H1
gttccttaagctccttagtgctgctccttgcagctctaattctatacgcctcaagttcttgcaaactatgagcatcccccagtgtacaagcctcccactgagaa

SEQ ID NO: 7222 - DNA, 103 bp, Glycine max
  Clone ID: 701099605H1
cctgcgtcctcaaaacgcctcaaggtgaatccagaggctcagccaatgaagggaaatctgaacaccgtgaagccgaaaatcccccagatggtcaattttggtc

SEQ ID NO: 7223 - DNA, 254 bp, Glycine max
  Clone ID: 701099606H1
ctgagggcaaggtcctggagcaaggaacctatgctcaacttaggcacaagagaggtgccttcttcaaccttgccagccattaaaatccaaacttaggtaatgtaaattattattttcatgtacaaatttgagttatggaggaatgtagcattgtgagcttgcttgggacaattgcttcctgcacctctggactttcttcctgaaccctactttggaacgtaaaacttacattccagattagtcattctggaaag

SEQ ID NO: 7224 - DNA, 251 bp, Glycine max
  Clone ID: 701099607H1
caccttcttcaattctcaatcttcttcttcttcgagaagccgctggagttacgatactctcaagaatttccgtgagatctctccgctggttcagaatcacatcaaacgggtttattttacgttatgttgcgcgtcgtggctgctgctgttggagcctttcttcatgttctgtggaacattgggggttttctcaccacgttggcttccattggaaacatggtttggctgctatctacaacccctgttgaaga

SEQ ID NO: 7225 - DNA, 255 bp, Glycine max
  Clone ID: 701099608H1
ctttcactggaatcacaatcctgaaacaacaacatcttagcatttatcatactactagacaacatgaacaccacattggaaagcggtttctcggcagagcgagaagctctggtggtgaagtcatcggatgtctgacgagattactggagagttgggtctcaagatgttcttgcagatgatttgagattgctccatcagctcagaaattgttctcattacatgagagattcaacggttcctttggagcaaaatccc

SEQ ID NO: 7226 - DNA, 256 bp, Glycine max
  Clone ID: 701099609H1
cggctcgagagaaaaatctacccaggttcgaacagtttgcaagcctttaaaatctgttggaatacatacagtgagtattcatccaggtgcttccttagatcatcagattcaaggtctgaaaacttgtgagcctggtttcttgtttctactcctgagaggctattggagcttgtttctacgaaggcaattgatatttctggggtatccatgctggttattgctgggcttaatactatctgtagtgctggccacgctg

SEQ ID NO: 7227 - DNA, 250 bp, Glycine max
  Clone ID: 701099610H1
atctgagagtctttcttagctgatatggcggttgatcgctcccttacgaggtgctgtagccacgtactgtggtcgtggatgttgctgaggatgatgatggtgcaaggtgcagacgcgagggataaccggaagggtgggactcggtcataaagttaacggctgaacaggtcgatgctgactcggatcatgaagtgggaacacgattggcggttcttgtggctggttcaaacggctatggaaactacaggca

SEQ ID NO: 7228 - DNA, 244 bp, Glycine max
  Clone ID: 701099611H1
ccattttctagggtttatacaattctcgatggcttcttcagatgttgagtaccgttgctttgtcggtgggctcgcttgggccactgacgaccaagctctcgagagagccttctctcagtacggcgaaatcgcttaaacgaagattatcaacgatcgtgagactggaagatccaggggttttggatttgtgaccttcgcctcggagccgtccatgaaagacgccatcgaagggatgaacggccaa

SEQ ID NO: 7229 - DNA, 223 bp, Glycine max
  unsure at all n locations
  Clone ID: 701099612H1
ctcttccattcacaacctttaacctttctttcttgtaaactttatctgattgattctgagaatagaactaagagggtatagacatggctagcgcaattgcagcttcttttttggttctgcttctggctttcccatgtattggagctgacatgagttgtgaacagtggtggcctcgggttattacacactggcctggganactcacagtgggcacttgggtcag

SEQ ID NO: 7230 - DNA, 258 bp, Glycine max
  Clone ID: 701099613H1
ctaaagactatgattttcaccttcttgatggccgttcaatcagggttcccttcatgacgagcaggaagaatcagtttattagggcttttgatggtttcaaagtccttggtcttccctacaagcaaggtgaagataacgccaattccaccatgtactttttccttccagaaacagaagatgggctgttagctttggctgagaagttggcttcccaatctgggttcttggaacgcgagcttcctcctagcaaattggaag

SEQ ID NO: 7231 - DNA, 265 bp, Glycine max
  Clone ID: 701099615H1
cacaaaccaaatcaatctcctattgctaacataacctatagcctagcaagttggcaaattgcgttctagcacaggcaaattgatggagctagctagctttaaattgcctctagtgagtcatgatgcatcatctttctttatcatacaaaaaaatataggttaagaaagttcgactcagttcagagtagggaaagcctctgatcttcttgttcttgaaagaaaacactctcaacactcaacagaaattctggctaatcctgggtgg

SEQ ID NO: 7232 - DNA, 259 bp, Glycine max
  Clone ID: 701099617H1
ccgctcgagctcgagccgctctttcgaatttcgatactttgatcagatccacaacacttcttcatccataccgcttggatcttcaggatccagtgtcgtggttccaaggaacttcagattgctggaggagcttgagaaggagaaaaaggaataggagatggcacagttagttatggaatggatgatggtgatgacatttacatgcgctcttggactggacccattattggtcactataatactgtacatgaaggaagaa

SEQ ID NO: 7233 - DNA, 257 bp, Glycine max
  Clone ID: 701099619H1
ctagccatcaaaacaacgtttgtttaacaaaacccattatcagatcagatccgatcagatcctcttcagattcggatcaccgccgagtccatgagcacgccagcgctttcagggggcacgggcctcttctctggttcacgcgtttatgcaagggccactgcggtggtgcttgtttgcggtcacactgcggttcagtttatcccttcagctgttaactatcttgctcttattcccgccaggacaatcccatttgcctg

SEQ ID NO: 7234 - DNA, 252 bp, Glycine max
  Clone ID: 701099621H1
cctggaacatgattctgctgcaaaggttacaggcatgcttctggagatggaccagcctgaagttttacatctgattgagtcaccagatgctctgaaggcaaaagttgctgaagccatgacatgtgttgagaatgttgctcaacagcaaaccaacccagctgatcaactagcctcactctctctcaatgacaatcttgtgtcttagattccgcctagtcatttgacaagaatctgtacaccagttatttctat

SEQ ID NO: 7235 - DNA, 252 bp, Glycine max
  Clone ID: 701099622H1
gctgatgtggagcctagcatagcaccagtgcaaattgatcaaagtcagcttctaattgatgggaaatttgttgatgcagcttctggttaatatcttaccttcatgaaaaacttttccaacttttgatcctagactggagatgtaattgccaatgttgctgaaggagatgctgaagatgtaaatcgcgctgtccatgctgctcgcaaggcttttgatgagggaccatggccaaagatgacagcttatgaaaga

SEQ ID NO: 7236 - DNA, 250 bp, Glycine max
  Clone ID: 701099623H1
ctcgagccgggacccgatgccggagcagccggatccgtttcgagcccggtggccgtgattactccttcggttgtgctgtcaatgctcgccatcttcaagcactgaatgtcacgatgccgattttttattttctgtggatttcgtgtgagcgttattgattcgttctacacatagacgtttattgttgttgatttatactgtaattcgttacggagtgatgattattacgcgctgatgttgatctatgtat

SEQ ID NO: 7237 - DNA, 249 bp, Glycine max
  Clone ID: 701099624H1
ccttgctgagtaagttacggatgacgtatacgcacagatcacgttggtgccggaatctaatcttgatgatccgatgaaccctgacccgtgcactgctgttcctccaagtgcaccagttcactcgttcatcaagacttgacagcttcagataccagcacccatggtggcttctctgttctcaggcaacatgccatggaatgccttcctgcgttggacatgtcacaaccaggcccatctctggaattggtt

SEQ ID NO: 7238 - DNA, 253 bp, Glycine max
  Clone ID: 701099626H1
cctcaacgcatgtactctgacaaccacaagctgcaagttatgctcccccatgtgaccggtaactacaccgccttgcagatgcatcttgtcaccttaatgcaacagaaccagcagcgaacagaaagcacggaaaagaggttgttcagggaaaggtagaggataaaaacgttggtgttggtggagggaaggtaccaagacagttccttgatataggtcccagtggcacagcagaagtagatgatcaagtttcgga

SEQ ID NO: 7239 - DNA, 255 bp, Glycine max
  Clone ID: 701099628H1
accgcaaacaacggtttgcggcgttttgaggggaaccgcaaggccaccgttgggaacgaatataaatttgggttgcttctacctagtgggaatgcccgttgcggtgaggttgagtttctttgccggctttgatttcaaggcttgtggcttggtttattggcagctcaacctcttgtatgttcaccatgttaattgtgttggctcgaaccaattgggagggtcaagttcaaagagccaaagaactcacatcatcgt

SEQ ID NO: 7240 - DNA, 258 bp, Glycine max
  Clone ID: 701099631H1
cttgtagcaaagaaaggtaaaggatatggccggcaagttgttgggtgcataccttatagatataaacaagacatagagggtaaaatgagcaacgaattggaagtactagtggttagttcacagaaaggtcaaggattgatgtccctaagggaggatgggaacttgatgaatccgtagaagaagcagcttaaagggatcccttgaagaacaggagtaatgggatgattagcgtgaatggggcatggatttcattagcaa

SEQ ID NO: 7241 - DNA, 254 bp, Glycine max
  Clone ID: 701099632H1
atctcctagcaatcatgtaaaacatggacgaaaaggtgcctcaaaaattaattcccatcatgaggatgccaaagagagttctgagttatcaaaccctgaagatatatctaaagctgagattaactcaggtggttctgaagcagacaggctgaagggtctgaaataattgtaactaagcagaagaacatctaacaagaaagcacaatcagtttcacgtggaaagaaacttaagaaagagaagagcttaaggtata

SEQ ID NO: 7242 - DNA, 102 bp, Glycine max
  Clone ID: 701099636H1
cacacaactcagtttccaattcaccaaactcacaatggttgatctagattggcaaacaaagatggttcagtccaacatcatgcgtccaatgtcccccaaagt

SEQ ID NO: 7243 - DNA, 87 bp, Glycine max
  Clone ID: 701099638H1
ctgaacccataacagctagttaatggccctcgctttcacttcttcaatttccgcaccacctaccacagtcccatcatcgggacacaa

SEQ ID NO: 7244 - DNA, 251 bp, Glycine max
  Clone ID: 701099639H1
ctttaaacgtctctctctcttcgtcccttgctctgtagcttggaatctgcagttgtagatcggagactgggcaagaaggtcgcattagcttcttcatcgcgcaatggcccatccctctgctgtcgtctcctcagaaggccaatcacccacgtcgtttttgacatggacggtctcttgctcgacactgagaggttctatactcaagtccaggaaatcatactcgctaggtacaacaaaacctttgattggtc

SEQ ID NO: 7245 - DNA, 81 bp, Glycine max
  Clone ID: 701099640H1
ccagattcagttactgcgtttcggaagcagatacagatggctcgtacgaagcaaaccgctcgtaagtccacaggaggaaag

SEQ ID NO: 7246 - DNA, 100 bp, Glycine max
  Clone ID: 701099643H1
gcgcctcttgatagggtctcccattttcaattccttctcagtttccttttctctgaaaaaagatgttgagggttgcagctaggaggctctcttctctctc

SEQ ID NO: 7247 - DNA, 261 bp, Glycine max
  Clone ID: 701099646H1
gcttagtaataatttggtctagaaactagcgcacctttccgataattatctagctacatcacttcttctgcgcttgtttgggagtgtggtggcaaaagttgagtttatatatgatcgatcaatatttgatgcccactattcaaggcatggtgtacaaaattttctgatatgtaagtctatttgcctttactcttaggggcccccatttacggggatgatggaggatggggtgagttggacaattgaaattttcatttttgc

SEQ ID NO: 7248 - DNA, 263 bp, Glycine max
  Clone ID: 701099647H1
cgccgctgccaagaagaagtgattgcatttgggcaattttgctagcacatgtgatcatcatcgtggttactcctttatagtagttttatccttgcagagtcttaggtgttttgtttaagttatatttttaagtttctgcgatttcatgtagccgtaactttcaaaactaggttcttgatcggcggtggtcaattttcattgctgtttgtttttgatgagtactgttttttgttttgatggtaagaagagtctgagatatttcg

SEQ ID NO: 7249 - DNA, 268 bp, Glycine max
  Clone ID: 701099648H1
aatctaactaataaaatagtgaagacatgagtaatggcacaatcaacacaagacaaagatgaaactggagtgttgttgttccaagttgccgccgccgcgttcatcctaggccagaatgaggcggttgcgttgcgttgttgtcctcctcggtgagtattcagtgttgttcgatctggaatggagaacgtgttttatcatgattttcattgttaataattttaaggaagcgtgccacatcatcgtcgacctcttctgaactagacaagaa

SEQ ID NO: 7250 - DNA, 197 bp, Glycine max
  Clone ID: 701099650H1
ctgacttctcatttggctgtccagttgacatgggagccttatggctacatggagtttgtaatgagaatccattggctccattgatacgtggcctggggctttcattatatcgtaccagtggtgacaactctgcttatatgatcatgacttggaaagttatatgctttttaacatcgatggtaagcaagttccacaca

SEQ ID NO: 7251 - DNA, 102 bp, Glycine max
  Clone ID: 701099651H1
ctgccaagcctctatctcagaatttgtggccacggaacccacaaaagtaaatatctgacccaatgttgaagtttgttcaagaactccatggagatttggaat

SEQ ID NO: 7252 - DNA, 252 bp, Glycine max
  Clone ID: 701099652H1
ggaacagaggaagaggaagagaatgttgtccaatagggaatcggcacgtagatcgaggataaggaaacagcagcacctggaaggtctgagtgcccaattggatcagcttaaaaaggagaacgcacaaatcacacaaacataagcatcacgacgcagatgtacctcaacgtggaagctgagaacgcgattctgagggctcaaatgggggaactgagcaacagattgaactctctgaacgaaatgataagtttc

SEQ ID NO: 7253 - DNA, 247 bp, Glycine max
  Clone ID: 701099654H1
ctacagtgtaaaaagcaatgcctcaagtcttcccacaccaaggtctgcttttgatatcttgtcttctcccaatcttaagcccttcacattcaatgagctaaagaatgccacccgaaattttcggcccgatgtcttctcggtgaagggggatttggatatgtctataagggatggattgatgaacacacatttacggcttcaaaacccggatcaggaatggttgttgctgtgaagaggctgcaacctg

SEQ ID NO: 7254 - DNA, 253 bp, Glycine max
  Clone ID: 701099655H1
cctaattggaagattgaagaaggagtgattgtaatctggaaggatgaggagtactattgttttacgattgggaagacgtgcgcgtattccattccaacgagcattagcaacgcagagtaacactaataagctactggtgtttatcgctctccctcgctgcctcagcgcaacgcggtcgtttcactttcagcgcaattcaccgtttggattctccagcgggcatgggcaacgcaggagcatgttcatccaaacg

SEQ ID NO: 7255 - DNA, 250 bp, Glycine max
  Clone ID: 701099656H1
ctcaaattgatttttcttgggcgcagaggttaggacaatgttgtaacgttgttagtgttttggttgtaaccaaattttgggaatgtaaacattactttatcgttttatatgcttatgctccaaaatgaaaattgtagctttattttccaaaaaaaaaaaaaaaaaaaaaaaaaaattaaaaataaaaagctttcgggggccccccatttgtgcatcccccgccccggaaattttttgggggggggcactc

SEQ ID NO: 7256 - DNA, 233 bp, Glycine max
  unsure at all n locations
  Clone ID: 701099659H1
ctcgagccgattcggctcgaggcatggtggaagctagagtaataactgcngaacatggtcaccgtttctgtgggggctctacccaggttctcatgatgttcgatttctcttattcttacccatcttcttataataaatatttatgatgacgtgtttcaggttctgtctcagacggagtcagtatataagacacctgctttctaacggtggtggagcagaggggtgtaggttca

SEQ ID NO: 7257 - DNA, 257 bp, Glycine max
  Clone ID: 701099660H1
cgaaagaggtttttgattgaagctggcgatatgaggaaggggaacaagaagaagaacaagctggtgtggatgatagcgacgccgtttagggtgttggggaaagcgagggacatgtacgtgagcagcataacgagtgcggtcacaacatgaattacagcaaccccgtggatgctgctggcagattccaggctttgcccaggagttacagtgctgccacgtcacgctccgacaacaacgaggatttcgccgaacttttg

SEQ ID NO: 7258 - DNA, 239 bp, Glycine max
  Clone ID: 701099661H1
cttctttttcctgaactcagtttcagtttctggcaaagccctaaaatggaggggactgtcttcactcctgcactgcaagaaattgagcatgtaaagactgatcaaggagaaattctgagcaagcctttcttggatggtgcaaacacatattgcctgtaatagataagactggagctgctatggcccttgttaaatctgacataggtggtaacatatcgagattggaaactatgtattct

SEQ ID NO: 7259 - DNA, 224 bp, Glycine max
  Clone ID: 701099662H1
ctgttttctaaatctcattcttcacctgcaactatttggattgctgatttttgttaataccatatttactgatattggcgcatttctttgagaaagttactaattcctagatagaggcaaaaatgttgggaattttcaggagaagttggttaaagcacccaaagagctgaacagtccagcttcgttgaattcatgcactaagccgaagctaagtcacgaaatcc

SEQ ID NO: 7260 - DNA, 221 bp, Glycine max
  Clone ID: 701099663H1
atcacattgattccgaagagaaaagaaaagatgtttgagccacaacagctatacactcgcgcgaagaccgaggaattcgacctcgaatcaggagaaaccctctacccagggctgagcgtcggcgagaaccagctccgatgggtttcatccgcaatgtctacggcatcctctccgcgcagatcgtcctcaccaacctcgtctccgtcaacaccgttttctat

SEQ ID NO: 7261 - DNA, 82 bp, Glycine max
  Clone ID: 701099664H1
atcgagccggtgaaaacaagggctcggtggtggatgaggatgatacggaggatagaaaacatgattggaagggtttggtgtg

SEQ ID NO: 7262 - DNA, 69 bp, Glycine max
  Clone ID: 701099666H1
gagtttgctagacaatctggtttatatggtggatttttattttttatttttttatgggctcatacacat

SEQ ID NO: 7263 - DNA, 249 bp, Glycine max
  Clone ID: 701099668H1
tggcagcatcacgatgtcaccgttaaggacgagaagacccttctcttcggtgacaaggcagtcactgtttttggacacagaaaccctgaagagatcccatgggggtcaactggagctgacatcattgttgagtcaccggagttttcaccgataaggacaaggctgccgcacatttgaagggtggtgccaagaaggttattatttctgcccccagtaaggatgcccccatgtttgttgttggtgttaatg

SEQ ID NO: 7264 - DNA, 88 bp, Glycine max
  Clone ID: 701099670H1
catttgctactcttcacccttgagaatttgtcattccgacatggaacttatttttaagcaccattttggcctgacttgtgtcttagta

SEQ ID NO: 7265 - DNA, 87 bp, Glycine max
  Clone ID: 701099671H1
gaatacccctctctgcatcacctttggttctccccttgtcggtaagaaaaagtgttcaagaagcgatatcacgtaggtctacatgga

SEQ ID NO: 7266 - DNA, 250 bp, Glycine max
  Clone ID: 701099672H1
actgtccctttctctctctcaaactaaaaactaaaacccattttcttctccaaaaccttcgactttcttttctctaaccgaaacgcgcttcgcagcacttcttctccactctctcacatctctgacccattgcgtatatttacgcactgtgtcaaattcccccataaaaccggtattgattctccctcagagcacaatagagttctgagaggtagcagtgttactcgcaatgaaaaatcttctgtagctt

SEQ ID NO: 7267 - DNA, 96 bp, Glycine max
  Clone ID: 701099674H1
cgaagcgtgaagcgttttccctctgcattaatttgtatctgcagtctgcaacaacttcttcttcagttcttcacaccaatcacgtaccgctttgca

SEQ ID NO: 7268 - DNA, 58 bp, Glycine max
  Clone ID: 701099675H1
gtcctggtgaccggcgcacgtctatcgtggggccacacgtgtccatcgctctgaagcg

SEQ ID NO: 7269 - DNA, 254 bp, Glycine max
  Clone ID: 701099676H1
aaacaaaaagaggttgatgcaaatggtagttctcaattgcagccatcaccatcaagtaattggttttcttcaaagtcaacaaaaaaggtgcctctttcctctgtgacatcaataattgaaggcttgaagagctctacattcagaagttgaagccattagaagttaattaccgttttaatgattttgtatccccattactgacaaatagtgactttgatgccaaaccaatggttatgcttttgggtcagtactca

SEQ ID NO: 7270 - DNA, 256 bp, Glycine max
  Clone ID: 701099677H1
gcgccggaggcctaattccactcttcggtgctccgcctcctcgttctcggagaagcaccacacgaactcctcgaactccgacgacgtggtggagctccccctgttccctctccctctggtcctcttccctggcccatcctccccttgcagatcttcgagttccgctaccgcatcatgatgcacacgctcctccacaccgacctacgcttcggcatcatctacaccgacgccgtctctggaaccgccgaggtcggct

SEQ ID NO: 7271 - DNA, 256 bp, Glycine max
  Clone ID: 701099678H1
cgtccatctggtttcacaaatgctcccgtcacaagggccttcatcatcgcttcggcgcttttcactatcttctttgggatccaaggccgtttcggcactctggggttgtcgtatcaggatatttttggaaagatcgcctttggaagttgatcatgtccatattttccttctcgtccacaccagagttgatgtttggactgtatcttctatattacttcagggtctttgagcgacagataggttccaataaatactc

SEQ ID NO: 7272 - DNA, 75 bp, Glycine max
  Clone ID: 701099679H1
ctcgagccgattcggctcgagccaaactccatttctcactcgccgaggtgtcttccgtctagggtgtctcctctt

SEQ ID NO: 7273 - DNA, 257 bp, Glycine max
  Clone ID: 701099680H1
cttatagttagagatatcactactacaccaccctgcatagtttgttcagctataatactacttgagcttctttacctacgtttcaaacctacattgcacacaatatggcaacctcttggtcatgttatctacttgcatgctctctttgtatgtcaactattgtatcagagagtagagtggcaaggaaggacttgggcctggaccttggtgggttgggggttggacttcgactgggtttgggcctggggatatgaggt

SEQ ID NO: 7274 - DNA, 253 bp, Glycine max
  Clone ID: 701099681H1
cacaaggactgggttttcactgatcaagcattacctaatgatcttgtaaagagaggagttgctgttaaggacccatctgctccccatggagttcgtcttttgattgtcgactatccttatgcttctgatgggctaggatatgggatgccatcaagtcctgggtgcaagaatatgtctcattctactacaagtcagatgaggaactccaaaaagaccctgaactccaagctttgtggaaagaacttgtagaggt

SEQ ID NO: 7275 - DNA, 274 bp, Glycine max
  unsure at all n locations
  Clone ID: 701099682H1
gtatgtacggtattcggctcgagcttagctcgatctcttgggctcgtcgaattcgaaatctgatctccgacgattggtcccggtagtgngtagtacactctccaatctgcaaaaatgcctctcagactcgaaatcaagcgcaagcttgcgcaaagatcgagagagtgaaatgtgtggatctacatccaacagagccatggattctggctagtttatactctggaactgtctgtattggganataccagtctcagaccatggcaaaatcttttga

SEQ ID NO: 7276 - DNA, 88 bp, Glycine max
  Clone ID: 701099683H1
ggctcgagtgcataagagagatatcttgagacagtagtagacttccttagctcttggtgtattttgtttagctgtctgtgttgttcct

SEQ ID NO: 7277 - DNA, 251 bp, Glycine max
  Clone ID: 701099684H1
ccgcttccgccaggtctttgggcaacataatcgatgtagatttggttgtaaaacagcaggcccaaacccagacccggcccgtttcctcaaatgggttgcccaagtcgacgagcgttggcatgggccggatcgacaggacacgccttatgatttgggggaaggggaagttcccgttgtgcccaaagcctatccaagaagtagaagctatgctgttggaaagacaagtgctgttttgtaaattgtcaagtact

SEQ ID NO: 7278 - DNA, 257 bp, Glycine max
  Clone ID: 701099685H1
ctgagggcaaggtcctggagcaaggaacctatgctcaacttaggcacaagagaggtgccttcttcaaccttgccagccattaaaatccaaacttaggtaatgtaaattattattttcatgtacaaatttgagttcatggaggaatgtagcattgtgagcttgcttgggacaattgcttcctgcacctctggactttcttcctgaaccctactttggaacgtaaaacttacattccagattagtcattctggaaagac

SEQ ID NO: 7279 - DNA, 254 bp, Glycine max
  Clone ID: 701099686H1
atctaatagcaggattccctaatccagccatctcgaaatgtccgacccggaaaacacacccgcgccccaatcggagcaagactcctcttcgccaccgcccgcccaagaccaacccgtcgccgctgacgccaagctggccccgccggcgtctccttcagcatatggccccccactcagcgcacgcgcgacgccgtcatcactcgcctcatcgaaaccctatcctccccctccgtcctctccaaacgttacgggac

SEQ ID NO: 7280 - DNA, 256 bp, Glycine max
  Clone ID: 701099687H1
agatttttggtggaatcgttaatgctggaaaccccgaattggaattaacagctcttgctgaaaatgactatttggttttcaatttcaatgattacccaaatggaattgtgacacttttcaattttcttgtcacgcaacctgggacgaagttatgacgagctacaaggacttaactgggacttcttggacttatttgtacttcattagcttctacttaattactgttttgctgcttttgaacttgattattgctttt

SEQ ID NO: 7281 - DNA, 240 bp, Glycine max
  Clone ID: 701099688H1
ctcaaattgatttttcttgggcgcagaggttaggacaatgttgtaacgttgttagtgttttggttgtaaccaaattttgggaatgtaaacattactttatcgttttatatgcttatgctccaaaatgaaaattgtagctttattttccaaaaaaaaaaaaaaaaaaaaaaaaaaaaaaaaaataaaaaaaattgggggggccccccatttaggagccccgccacccgggaattttttcgg

SEQ ID NO: 7282 - DNA, 251 bp, Glycine max
  Clone ID: 701099689H1
cgacagaaatcaagcattgggtcgaactcttctttgatgtcaaagtaatagctatgaatagtcatcgactcccggtaaacggtagaagagtacgacctattatgggacatacaatgcattacagacgtagattattacgcttcaaccgggttattctattccacctcttagaaagaccaacccttaaatcacaatacttaatagcatggcgatacatttatacaaaacttctaccccaagcacacgcaatg

SEQ ID NO: 7283 - DNA, 251 bp, Glycine max
  Clone ID: 701099690H1
cctcgagccgattcggctcgagatttactcatgaagttgtgctgtaaccaaattctgttattacctttcctgcatctggaaacttggattacaagttgtgttccaactaaaccggttttgctgtgccaattaatagacaaaaggaaccaggaaatatggaaatgacaagggaaatattataagaaaatgacgatgtaataactacaattcttagttaaactttatgtttaaggtatgtgcataatatgtaa

SEQ ID NO: 7284 - DNA, 250 bp, Glycine max
  Clone ID: 701099691H1
ctagcttcttccatcctcagagcttgccgtcaacaacgattcctttcggttttctgtttctctggattcattttcatttttacggctaccagaatgtccagctcatcggaatattcggcattttccggccccgcccggccaagtcgccggccgagaagtccactttctctcagacttgtagtctattgagccaatacatcaaggaaaaaggtgccttcggagaccttaccctcgggatgactcgcacccc

SEQ ID NO: 7285 - DNA, 251 bp, Glycine max
  Clone ID: 701099692H1
cttcttcaaaatgatattgatttgctaaatcctccggttgagcttgagaagaggaaacacaagctcaagcgtcttgttcagtcaccaaactctttcttcatggatgttaagtgccagggttgcttcaacataccactgtctttagccactctcagactgttgtaacatgcggaaactgccagactgtcttgtgtcaaccaaccggtggccgggcaaggctaactgagggatgctcctttaggaagaaggga

SEQ ID NO: 7286 - DNA, 222 bp, Glycine max
  Clone ID: 701099693H1
ctcgtcccaattaccgtttttgcctctgctgtgggttccttctctgttctcagatctcactcagttccttcgccggagccatagttcttgattccctcaccaccgtgattcgtctttccaaacttcttttcactcgagtgagaatgtatagtaatgttggatcccaacccggagtacagcagcctcaaacaagtttgcctccaaatccttttgggagcgcgt

SEQ ID NO: 7287 - DNA, 233 bp, Glycine max
  Clone ID: 701099695H1
cgtgagtgttgaagagattcgtaaggcgcaacgtgcagaaggccctgccactgtcatggctattggcaccgccactcctcccaactgcgtggatcagagtacctatcctgactattatttccgcatcaccaacagcggcacatgaccgagctcaaagaaaaattcaagcgcatgtgtgataagtcgatgattacgaaccgatacatgtacttaaacgaagagatcctgaaagg

SEQ ID NO: 7288 - DNA, 108 bp, Glycine max
  Clone ID: 701099696H1
ccgaaatgtatcgaacggcggcgaacgagttggtgagcggtgcaagatactactatactggcaaggttgggatcagattccggccttctcagagattgataccctctt

SEQ ID NO: 7289 - DNA, 283 bp, Glycine max
  Clone ID: 701099701H1
ccaagatgaagaggcagagaggtgtgcatgtgaatgctgttaggcccatcatgaataatcatcctcccaatgttgaagatgtagctgcagctgcaatggggaagaagaaagtgaagaaagagggtgagcagaaggtggggaatattatggtggaggaagaggagataaaggaaagtagtactagtagagacagcatggtgggtgggtatttgcagcaacatcaacaaggtggcatgctgatgggttggaattgggaggagaatatgaatatgccattggtggg

SEQ ID NO: 7290 - DNA, 285 bp, Glycine max
  Clone ID: 701099702H1
tctcccaactcgccctcgactcacatccttgtccgattccgcgaacgagtctgactccatcgggttggtaagatctattctgtttcttcgtcatggcaaccggacaactattctcgcgtactacacaggctttgctttacaactacaagcaacttcccatccagcggatgcttgattttgacttcctttgcggcagggaaacaccatcagttgctggaataattaaccctggttctgagggatttcaaaaacttttttttggtcaggaggaaattgccatcccag

SEQ ID NO: 7291 - DNA, 281 bp, Glycine max
  Clone ID: 701099703H1
atgagtatgtacggtagggatccgtggggagggccgttggagatccacgccacagactccgccaccgacgacgagcgcaccggaatctccaggagctggaccgaggcgctttagacgagacacaacagagctggctcttgggcgccggagaacagaaaaagaagaagaaaaggtacgtagatcttggctgcatcatcgtcagccgcaagctcttcatctggacactcggcactctcgccgtctgcgacttcctcgccggcttcatcaccctcatcgtcaaa

SEQ ID NO: 7292 - DNA, 278 bp, Glycine max
  Clone ID: 701099704H1
atcacattttgttcatcatcgccttcaacgccctgaccttgaagacgatgagaaccaacaagaccaagacaacaaccttaacgatcacgaagggcttgacctaattacaccaaatccaggtcctggcgatgttgttggtcgcaggccaagaggaagacccccaggttcaaagaacaagccaaaaccaccagttatcatcacaagagagagtgcaaacacccttagggctcacatccttgaagttagtactggttgtgacgtctttgaatcggtcgcta

SEQ ID NO: 7293 - DNA, 278 bp, Glycine max
  Clone ID: 701099705H1
cgacgccaagctcttggcaaagctcttcgatgtggtcgctttcacccacgtgatgcacctcgcggcgcaggccggggttcgctacgccatggagaatccccactcctacgtccacagcaacatcgcggtcctcgtcacgcttctcgaggcctgcaaatcggcgaaccctcagcccgcggtcgtttgggcctcgtccagctccgtctacgggctcaacgagaaggttccattttccgaatcggaccagaccgaccggcccgctagcctctacgccgcaa

SEQ ID NO: 7294 - DNA, 279 bp, Glycine max
  Clone ID: 701099706H1
ggagtttcaaaacaagttttatgagggtgatggatacaagttccaccctttctcgttctcctggctggatgatgaggaatgatatgctctaaactcgcattaataagaacgaagagttatatagctttggacctgtattgattctttcatttgatgtaactagtcagtaattggtatctgtggggcattgtatgtggtggaatccttggagcattttcatcaaacgtgccgttttgtttatttatccattgagggaataaatattcccaattaggggag

SEQ ID NO: 7295 - DNA, 279 bp, Glycine max
  Clone ID: 701099707H1
actcgagccgctcgagccgctcgagcggtgaggttccggttaaacctgtggttgcagatgaaactagtactgagagcacaaacaatgatgaacttgaaccacacgaagagggttatggcgaaaaccccctcagtgaagaggcaatcttgtgggaaatacaaaggtgttcggatgcggaaatggggcaaatgggccgcggagattcgtgaccctttcaagggcacgcgaatctggttgggcactttcagcactgcagaagaggcttctcaagcctatgag

SEQ ID NO: 7296 - DNA, 280 bp, Glycine max
  Clone ID: 701099709H1
cttactcaaacagataaaggaattgaaatcgaggctggtgcaagaagagaacaacaacaacactgaaagcgatgtttcggtgaaggaagagatgatagccactctgcaggatagtaacccgctctgtgaatccgccattcctggatcggactcgaaggagttgagttacgagtgtttcaacaagagtgatgaggtgggagggggttctgtgttccctgtggatttcaaagatgggtcttctgatagcgactcaagtgcgatcttgaacgaggagaacaac

SEQ ID NO: 7297 - DNA, 280 bp, Glycine max
  Clone ID: 701099710H1
gcagttccacacaagcaccttcatctaaaattcaagtatcgaagaagaagatggctttaggtgttcctgctcttccgttgacatacgtggctcacgttctggcagttgttgccagcgtcttggtcgtggtctgggtcgtcaatttcaggggtggcttggcttgggattctgataacaagtccctcatcttcaacattcatccagttcttattgttattggcttactagttcatgggggtgaagctattataagttacaaagcttttcccctaaagaagga

SEQ ID NO: 7298 - DNA, 256 bp, Glycine max
  Clone ID: 701099711H1
ttcgagccgcaagagagagctagcagtgcaagctttcaacatccaaaacaacagagagtttttggatttagaagctgaaggaatatagttatcacaatggggagagctccatgctgtgagaagatgcggttgaagagagggcaatggtctccagaatcagatcaaattctcatcaattacatcaacacttatgggcatgctaattggcgtgcactgcccaaactagctgggctattaaggtgtggaaagagtgtta

SEQ ID NO: 7299 - DNA, 283 bp, Glycine max
  Clone ID: 701099712H1
gtttctgatggtgtcatgaccttcactcttgatgctgctgaagaattgggtgtccccgaggtgctgttttggaccactagtgcatgtggatttatgtgttacgtgcaataccaacaactcattgaaaaggacctaacacctctcaaagactctagttatatcacaaatggttatttggagactaccatcgattggataccaggcattaaggaaattcgattgaaggatattcccagtttcgttaggaccacaaatccagatgagttcatgcttgatttcatac

SEQ ID NO: 7300 - DNA, 280 bp, Glycine max
  Clone ID: 701099713H1
gagattagagaaacaactatggaaggagaaaatggaaagaagctgaaaatattgtgcctccatggattcagaacaagtgggagttttcttaaaaagcaaatcagcaaatgggatccttctatattcactcaatttgatatggtaattaatgtttttttttaatgttcaagtttgtgcatgcatgaagcatttttaaccttaagcctgttgttcttagacatttcaaattcttccttttattagtgttagtgctgattagcccttgttcttaataattgct

SEQ ID NO: 7301 - DNA, 285 bp, Glycine max
  Clone ID: 701099714H1
ctgatttgcactgcagctgttttgggtcgtttgccagggacaactgtttataggaatgttaaacagtaccctgaagcatatacatataatggaattgtaatcgttcgtgttgatgctccaatttattttgcaaacacaagttacataaaggacaggttgcgtgaatacgaagttgatgttgattgttctaaaagacatggacctgaggttgaaagaatttattttgtgattctagagatggcacctgtgacctacatagattctagtgctgttcaggctttgaaa

SEQ ID NO: 7302 - DNA, 280 bp, Glycine max
  Clone ID: 701099715H1
tgtcactggagccaacgttcaggtttgctgggagaaatttgcaaggtactttgaggtggagttgaaggaggtgaagctccgtgatgattactatgtgatggaccctgaaaaggccgtggaattggtggatgagaacactatttgtgttgctgctatccttggttcaacactaaatggagaatttgaagatgtcaaacgcttaaatgatctcctaattgaaaagaataaaataactgggtgggacactcctattcatgttgatgcagcaagtggtggcttc

SEQ ID NO: 7303 - DNA, 285 bp, Glycine max
  Clone ID: 701099716H1
ctcttgatgatgtgctggccaatttcgataccaatcttggaattcctttcggttctgtgctcaatgatgctgttcgtataagctacgccgcacacctgatgcttgtatttccagttgtcttctttccattgcgtctcaacatagatggcctcctcttctctaaatcaaggcctctggttctggataacttcagatttgcatcactcactattgcccttattggtgttatcttcctgggagcaaatttcatacctagcatttgggatgctttccagtttactggag

SEQ ID NO: 7304 - DNA, 308 bp, Glycine max
  Clone ID: 701099717H1
caagcgaacgtcagaactcggctcgagacattaatttgtgatagctcaccatggccattgctacttgtgatcatgataagaacgcaaaggctttgcagttcattgaggatatgacccaaaacactgaaagtgtccaagagagggtccttgctgagattctcagccaaaactcccagaccgaatacctgaaacggtttgagctgaatggagccacagaccgcgacactttcaagtcaaaggttcctgtcgtttcctatgatgatttgaagcatgatatccatcgcattgctaatggtgaccgctctcct

SEQ ID NO: 7305 - DNA, 275 bp, Glycine max
  Clone ID: 701099719H1
ctggaagttcaagcaatagttatactcccttccgtggtcctcctacttcatctgaatcaaggggactgtcatctggggtaaacccgttcgagaggcaaggtgatagtgaatttggaattccatattcgttacaatctttggttgttgctggtgaaggaagtagtagacttgtatctgagctgcgcaatgtgttgggcctcatgcgtaggggtgggaacctgcgatttgaggatgttatgatccttgacccttcagtgttctctggaattgctgat

SEQ ID NO: 7306 - DNA, 278 bp, Glycine max
  Clone ID: 701099720H1
gggatctccgtcaggttagaaacgccgttttgcgccaaaccggttttctcgattgatttaatataatttaatttaatttacctttttttttctctttctattttgaggtggggaagttaaattttgatagcttctctgcatcctgtgatagcttctctctatgtaacttcgctttcggatgatctttttgttctctttgatttatagaatctgtaaaacgatgtaagttgttggaccaaacttggataaagttctctattttttttttttcattttct

SEQ ID NO: 7307 - DNA, 280 bp, Glycine max
  Clone ID: 701099721H1
ctaatctccatctaatagtgtttatttgtctttctctatctctatcggtcatgggtgcttttgcttttgatgaggaaaactcctccaccgtggctccggcaacactctacaaagctctgacaaaagatgctgacactatcatcccaaagattattggggccatccaaactattgaaatcgttgaaggaaatggaggacccggaaccgtcaagaagataacagctagtgaaggtgaccaaaccagtttcgtgctgcaaaaagtggatgcaattgacgaggc

SEQ ID NO: 7308 - DNA, 279 bp, Glycine max
  Clone ID: 701099722H1
gaaaaaccaagtaatactagccaaaatatgtctcccaaatacatgtcccttttcctcctagtaatactagggatggcttttctggccactacttcccttgctgatcgtcgttttctttcggtggaagatggtcatgatcaccatcaccaccacccaccaaaaaaacactggcctccaaccacacaaaatgaaccttcaaacgtagaaaacaaggagaacactgaggtggaggatggtcatgatcatcaccatcactacccacctaaaaaacactggcct

SEQ ID NO: 7309 - DNA, 281 bp, Glycine max
  Clone ID: 701099723H1
caacataatgatgggaaaaagtttttcaaacccaatttggaagctgatcacatctccaacctggttgaatgcatacaaggatggtcatgttgcaccatttgttaagtctgaacccattcccgagactaacgatgaacctgttaaagtgctagttggggccagtcttgaggacattgttttcaaatctgggaagaatgttctgctggagttttatgctccctggtgtggtcattgcaaacagttggctccaatattggatgaagttgctatctcatatcaaa

SEQ ID NO: 7310 - DNA, 279 bp, Glycine max
  Clone ID: 701099724H1
cctcactaagcttctcactgatgagaataggggagaggatctgcgcagcttcttactcagttgaggccattcttctccttgatacctaaggcaaaaactgcaaagattgttaggggaataattgactcggttgctaaaattccagggacatctgatctacaaattgcactctgcaaagaaatggtgctgtggactcgtgctgaaaagcgtacctttctgagacagcgagttgaggcaaggcttgcagcacttctgatggaaagtaaggagtattcagaa

SEQ ID NO: 7311 - DNA, 282 bp, Glycine max
  Clone ID: 701099725H1
aggtaattatatacaagactgtccaagagatgccacctaaccccaaggagccttgggaccttgaaatggactatgatgacactttgacgttggaaattcctattgaacagctaccagatggtgatggtgcagatatagcaatttctcccaatcaggttggaactcatactgttcaaggggtggcctccacttcttcaaccggtgtggctactgctgagcctgatttagaattgcttgctgtactgctaaaaaatccggagttggtatttgccttaacttctg

SEQ ID NO: 7312 - DNA, 282 bp, Glycine max
  Clone ID: 701099727H1
aaaatgcccactttttttcttccaacgctcctcctccttctcatagccttcgccacctctgtctccggccgccgtgacctcgtcggagactttctccggctgccctccgaaactgataacgacgacaacttcaagggcacccggtgggccgtcctcctcgccggttccaatggttactggaattacagacatcaggctgatgtttgacacgcctatcaaatattgaggaaaggtggtctgaaagaagaaaatattattgtctttatgtatgatgacattgca

SEQ ID NO: 7313 - DNA, 279 bp, Glycine max
  Clone ID: 701099728H1
gaagattccaatcggagctcagaaaaaaaagaaacctaatcgccgatcgcgtcgaaagtccctaagcttacatcctgcttctagatagttggtaatcttatctgagggtagtagctagtaccatgggagaagtggcagtaatgcactctgagcctctgcagtttgagtgcaatgacattagtgtgaatatgactgagaaggaagtgtatcctccagaatcaaatgtggagcgcttacctggagaagaatcgagtcaatcaacagaccacaaaaatatca

SEQ ID NO: 7314 - DNA, 282 bp, Glycine max
  Clone ID: 701099729H1
gaaccggcgaaatgtcacccacagataaggaaaggcggtaacatatcaaaccgtaccttacgcaattggatctgcttttcttttctgctcttctgccgcttgatgcaacctcgacctggaaacgctcgttttggcaaaatctgaatctgaagcattggaatttggaagcgcatcgattcaattcgatgcgaggccacgattggatcaacacgctgatccccgacgagctactcatcgagatcttccgccgcctggactcgaagtcgagccgcgacgccggct

SEQ ID NO: 7315 - DNA, 280 bp, Glycine max
  Clone ID: 701099730H1
ccacttggcgatcttcaaattctgagagagatggatctggtccctttggttatggacttggtggcgcacttcagatgtttctgccaagagttctcctggttatgttggtggttacactgttaataagaggcagccaaataggggaatcgctacataggaagatcgttttgatgacacgaacttgtaggtgaagataatccagtgaagcaggtgaattgtgaattttgcacaccactattgttactgaatttcggttttaagacgcaagatgtttggtttt

SEQ ID NO: 7316 - DNA, 284 bp, Glycine max
  Clone ID: 701099731H1
atccgtgttcctctctctcatctctctttctctctgttccctcggtttccttactttgaagtttaatccaatccaataatccaataactacatacaaagttgaacaataccaccatcatagcgtatcatcatcagaattccaaggtggatttgcttcatcttttactccggcttcatgctgcatgagtaaaggccgttatgttatgctcatggtggatttttgtgcaactgggactaggggaattgatgatgtggtggtggtgagaatgatgtatggggagtag

SEQ ID NO: 7317 - DNA, 285 bp, Glycine max
  Clone ID: 701099732H1
caccaacgcaactaagaaagaaaccaaaagaaaaacaagaacaagtcaatttttcaattttcaatggaaaaccaaacctcatcgatgcagtttctcatcctcgaacaagttcagttcttgaaggtgaacgacgattccctcttgcagtgggaactcgtcgacgttgttgacgccgaagaggagatcgatgggttcggttcttcatcggattcttcttccgtttcttggttcgaatccgattcttctcccatcgatgcctcaattgaagaaattcgccaacttctt

SEQ ID NO: 7318 - DNA, 282 bp, Glycine max
  Clone ID: 701099733H1
ccggataggaagaacgggacgagctggtaaaatgggattagcaacggccttcttcaacgaaggtaatttgaacttggctaaatcattggctgatttgatgcaagaggcaaatcaagaagtacctgcctggctcagccgatatgcagcaagggctatttacagtggtggcaacagaaataggaagtctgggggatctcgttttggtggccgcgattttaggaaagagggttcgtttaataaagcaacggattactatggcagtggaactggtggtggatatgg

SEQ ID NO: 7319 - DNA, 278 bp, Glycine max
  Clone ID: 701099735H1
agagagcaaactggtaacatgtacaagaatgtgaagaggaagattgagagaggtgttgccttcccgacatgtgtgtctgtgaacaacactgtctgtcacttctctcctcttgccagtgatgaaacagtgttggaagacggtgatatagtgaaaattgacatggcttgtcatatagatgggttcattgctgctgtggctcacacccatgttcttcatcaggggccagttacaggacgggcagctgatgctattgcagcagcaaacaccgccgccgaagt

SEQ ID NO: 7320 - DNA, 278 bp, Glycine max
  Clone ID: 701099736H1
cacaacacgagcatttgtttcaattccaaatcaaagaggtcgaagaaaaacaagagcaaattgggatcgaagaatttgaagaacaccacaagcaagatgcatgttgttgtggtgctcaacacgcaatcctactgcagaggcctagaacctccttcatcttctccttccgtcgtttccaacaagggaacaaggactttgagtttcaggaggctgctgctgcgtccttctcttgggattcatttatcgcgtactttgctttaaagtgtgttgttactccg

SEQ ID NO: 7321 - DNA, 276 bp, Glycine max
  Clone ID: 701099737H1
ctagagttctaagcaatggcgattatctccgatttcaacgaagaggagccgaaacccgctcactcttcaccaccgcaaccccaatcctcttcttcttcgtcttcgttcagtgctacttttgaccggtcaaatcccatcgctttcctggagagagtcttcgaattcgtctccgaacagagcgactttctggcgacgcagagcgccgagaaggagatagtgtcgctggtgcacgccgccgggaagaagaagagagagcttctcaaggcggagagagaa

SEQ ID NO: 7322 - DNA, 273 bp, Glycine max
  unsure at all n locations
  Clone ID: 701099738H1
ccgaggtattgggggcaccgaaaccatctgggtcgggtgatggaagaaggggttatttgccagtggagcgtgtttagatctctcttggctatccttcagtggtgggctttcaatgtcactgtcattatcatcaacaagtggatcttccagaaattggatttcaagtttccactgtcggtatcctttatcctcttcatctgctcggtcnatggaggatatgtggtgattaaggtgctgaagcttaaaccactgataactgttgaccctgaagac

SEQ ID NO: 7323 - DNA, 279 bp, Glycine max
  Clone ID: 701099739H1
aaacaactctctttctctctctctctctctcagttctttgtaacgaaacgcaacgcaacgcaacgcaacgcaacacaaacgcacccttcctatactccgcagatcactctggcaccgttaattcggcgtcgccgtttcaaggaaaaaaggcattaaagaaaagattcccttggatcattcatggcatcaagatcatatgttaatctactagacttagctggaggtttactggatattcctcacacgccaccctaaattccaaggattatgacagttcct

SEQ ID NO: 7324 - DNA, 281 bp, Glycine max
  Clone ID: 701099740H1
cagagcacctactcactcgtaaatggcgaggaagaagatcagagagtaccactccaagaggcttctcaaggagcatctcaaacgtctcgcctctatcgacctccaaatcctctcagctcaggtgacagaatctacggatttcactgagctgacagaccagcatccatggctttcgtcaaccagattggtcgtcaagccagacatgctgttcgggaagcgcggcaagagtggcttagttgctctcaatttagacatagctcaagtcgccgagttcgtcaaag

SEQ ID NO: 7325 - DNA, 281 bp, Glycine max
  Clone ID: 701099741H1
accgttcgcaacacgatcactattctgcgacgatggtggcacattcgagttcttggggaagggcactcgtcgcgatctcgccctacaccttctccgccatcggcatcgccgtcgctatcggcgtctccgtcctcggcgccgcctgggggatctacatcaccggaagcagcttgatcggcgctgcaatcagggctcctcgaatcacttccaaaaatctcattagtgtaatcttctgtgaagctgttgctatatatggtgttattgtggctattattcttcaa

SEQ ID NO: 7326 - DNA, 277 bp, Glycine max
  unsure at all n locations
  Clone ID: 701099743H1
caaagttccaaaccctaaacgagatcannntacttttctggttttctctttttcaatcggtgcttcctccggcggcgcgagggagtgtctttggcgcgtgattcctagttccccgcttacctatgcttcgctcgacccgcattgtagagttcacgccggagagacggcggaatctcaccggacgatcgtgatttcgcatcttcatggcttccgcctaccggaacgaacctaattggccacggcatagaagcgctggagctggattcatgggaaaagt

SEQ ID NO: 7327 - DNA, 278 bp, Glycine max
  Clone ID: 701099744H1
cgaggatatatcaagctcctctgaagccgttatctgacaatggggttgttgtaaccatttggtatcgtgcacctgagctgcttcttggagcaaaacattataccagtgctgttgatatgtgggctatgggatgcatttttgctgagttgttgaccttgaagccactatttcaaggggcagaagtcaaagctacatcaaatccctttcagcttgaccaacttgacaagatatttaaggttttaggccatcccacattagaaaagtggccttccttagca

SEQ ID NO: 7328 - DNA, 283 bp, Glycine max
  Clone ID: 701099746H1
cggctcgagtagttaaatccttctgctctgcgtcttcttgttcctctcgcccagaatccgagatcaaccctgacccctaaggccaggggtttttctcggcttcttcagattcctgaaatggcgtctgtttcagctttagccaagtacaagctcgtcttcttgggtgaccaatccgtgggcaaaaccagcatcatcactcgcttcatgtacgataaattcgataacacctatcaggctacaattggtattgattttctatcaaaaactatgtatctcgaagatc

SEQ ID NO: 7329 - DNA, 284 bp, Glycine max
  Clone ID: 701099747H1
ctaaaccaaacctctcactcgccgtcgtagggtttctcctttcgtttagcaacaacaacaatggttgcagccaagaaaaccaagaagacccatgagagcatcaacaacaggctcgctcttgtcatgaagagtggaaaattcaccctcggttacaagatggttctcaaatcacttaggagctccaaagggaaattgattatcattgctaacaactgcccccctttgaggaaatcagagattgaatactatgctatgttggccaaggttggagttcatcattacaa

SEQ ID NO: 7330 - DNA, 283 bp, Glycine max
  Clone ID: 701099748H1
gaaactctcatttgaagctaacaaacaacaaagatcaacggatctatctaccttcagtcatggtgttttctttcaaccaacgcttctgggtttcttcttcgcttctcctcctcgcggtcctctctgtttcttctctcactcccactttcctttctgacaccgttttcgattctcaaccagcgcataccggtcggaaccttcttcaggctaaaaagggttgttctgtgaatttcgagtttttaaactacacagtaatcacaagcaaatgcaaaggaccccggta

SEQ ID NO: 7331 - DNA, 281 bp, Glycine max
  Clone ID: 701099749H1
gtctgatatatctgattttgaatttgacccttgcggatattcaatgaatggaatagaagggagtgctatatccaccatccatgtcactcctgaagatggtttcagttacgcaagttttgaagctgttggttatgactttaatgacatggctctaggtgaacttgtggaaaggattttagcttgcttttgtccagcagagttttctgttgctttgcacattgacatgcagtctgagaaacttaataaatttcccttagacatcaaaggatactactgtggtg

SEQ ID NO: 7332 - DNA, 275 bp, Glycine max
  Clone ID: 701099750H1
ctgatatgcatcttagtaatggagataatcaaggagcaagtggtacaggccttggagttttattaagtcctatgataaaggttctggatgagatgtatagagcacaagatgatttgatcaaggaaatacgcaatcatgacaatgctaagaaagaatggactgatgatgaactgaagaaactatatgacacccatgaaaggctgctagatcttgtttcattgttttgttatgttccaagaacaaagtatctacctttgggcccaataagtgccaaa

SEQ ID NO: 7333 - DNA, 280 bp, Glycine max
  Clone ID: 701099751H1
gcgcagttccctacctctcctttcaagatgcagatcttcgtcaagaccctcaccggaaagaccatcacccttgaggtggaaagctctgacaccatcgacaacgtcaaggccaagatccaggacaaggaaggaattcccccggatcagcaacgtctcatcttcgccggaaagcagctcgaggacggccgtaccctcgccgactacaacatccagaaggagtcaacccttcaccttgtccttcgtctccgtggtggcatgcagatcttcgtcaagactctca

SEQ ID NO: 7334 - DNA, 278 bp, Glycine max
  Clone ID: 701099752H1
ggaatctcaaaacgacgtcgttgacggttgacgcggtttcgtgtttttatttttctcagatttatatatatagagaagaaggaaaaattgttgttgatgaagagttttctggagagacaactgaggtattggatgagaagaaaatggagaaaatgagattgtattaccaagagctgagtaactcaaaggaagaaccatggacagcttcatctacttctgtagcagatctttatcctgtgggcctagattcttcttacttggagaagagagattaaaga

SEQ ID NO: 7335 - DNA, 275 bp, Glycine max
  Clone ID: 701099753H1
ctcttttaaccaggccgtcggcgccaccactcccttcttcaccgccgttttcgcttacgtcatgaccttcaagcgcgaggcctggctcacctatctcaccctcgtccccgtcgtcaccggcgtcgtcattgccagcgggggtgagccgagcttccatttatttgggttcatagtatgcattgcagctactgccgcacgtgccttaaaatccgtgttacaaggaattttgctttcttctgaaggagagaagttgtattctatgaaccttcttcttt

SEQ ID NO: 7336 - DNA, 277 bp, Glycine max
  Clone ID: 701099754H1
atttttcagtattttgttatggatgattttcgtggtcctccccaccttcagggtccttcccccaccctcagggtgaacgtaacgcttgggcctcaggtggacagaatgatgatatctggactgcacaccgttgaagacatattttgttgcagctgtggacaacctcttggatggaaatatgttctgacacatgaaaagaatgaaatatacaaagaagggaagtttgtgcttgagaggtggacgatagttgacaatgaagaggaggaattgaattctg

SEQ ID NO: 7337 - DNA, 274 bp, Glycine max
  Clone ID: 701099755H1
caacgatgctgctggactacaactttcaagaaagatgagaaagagtgtgttttggttcttctgtatcaaagtggagacattgaattaaggtccttgccagctttggaagtgttgggagaaagctctttaatgtcgatcctcagatggaacttggaaaccaacatggtgaagacgatatgttcttcatcaaatggaaaaattattctggtcaacgggaatgaaactgcttgcatatcactgttgaactgtgaaaatgagttctggactccagagt

SEQ ID NO: 7338 - DNA, 280 bp, Glycine max
  Clone ID: 701099756H1
cggctcgagccgccctttttttttttttttattattccattttccccctctagtagtcagtgctacgaagctgctcgtgggtgtggctgatgaagaaaacctcgtagataagcccagcaattccacctccgatgagagggccggcccattagatccagtggttggtcaaggtcaagttcacgaaagcaggcccaaatttcaaagcagggttaatggttgctccggaaaaggccccacccaaaaaaatgttagcgccaaaaatgaaaccaatggcgatggg

SEQ ID NO: 7339 - DNA, 278 bp, Glycine max
  Clone ID: 701099757H1
gagaacctgcttggccttttgagggttcgcgtgaagcgtggtgtcaaccttgccgttcgtgatgttcgaagcagcgacccctatgttgtcatcaagatgtaccgccagaaactaaagactcgtgtgattaaaaaggatgtgaatcctgagtggaatgaagaccttactctttctgttataaatccgaatcacaaagttaaactgactgtgtatgatcatgacacttttagcaaagatgacaaaatgggagatgcagaatttgacatcttgccctttat

SEQ ID NO: 7340 - DNA, 276 bp, Glycine max
  Clone ID: 701099758H1
aaacagcagtgatagagctccaaaatagattgaaagcaagtaccatggaggtaaagatcttcaatctaaaggttaagaccttacagtctgagaattggagattgaaggaacaggttgctggtcatgcaaaagtgctggctgagctggagactgccaaagcgcaagtcaaattgctcaataagaaaattaggcacgaagctgaacataatagggagcagatcataactcttacgcagaaagtttccaggttgcaagaccaagaatgtaaagatgttg

SEQ ID NO: 7341 - DNA, 279 bp, Glycine max
  Clone ID: 701099759H1
gaaggattgaagtttctgtctttttctgatctccgcgtgcgtggtttggttttgttgttgaagatgttggtagctaatagctttgatctatggcgaaaggacgcttttttctctgcggcggaagaggtgcaggaatcagctgatatgtacgttccccgattcgtctctttgattcacggttcctgttttggacccctttcagttgtttttcattggcttaatttaatcacaagattagaatggaatctgcatacagggcatggttgagagagaagagag

SEQ ID NO: 7342 - DNA, 279 bp, Glycine max
  Clone ID: 701099760H1
cacaatatcttaaggagttatctgtgaaggatccccaagcattcatttgccatttttacaatatctactttgctcattcagctggtggtcgaatgattgggaaaaaggttgctgaaaagttacttaacaacaaggcgttggagttctacaaatgggatgatgaccttccacgattgttgcagaatgtgagagacaagttgaataaagttgctgaaccttggagtcgggaagaaaaggaccactgtctggaagaaacagaaaaatcattcaagctctctg

SEQ ID NO: 7343 - DNA, 279 bp, Glycine max
  Clone ID: 701099761H1
gatgaatgttggggcaatgaaggtttggtttaagatgaggcccattgacggtggtgcatttttagaggtgaaatcggtggaggaattcacattcttaaattcatcatatgtcccgatcttgaggcaacttgagtcagcaaaaatgaagcagcggttcttagagaatcaagctgataatgccacaaatggtgcaaacctgaaaaatacaaagtccctgtccatgttggatcaccttcgattttatttgccagagatgtatcctaacttgtataagatctt

SEQ ID NO: 7344 - DNA, 226 bp, Glycine max
  unsure at all n locations
  Clone ID: 701099762H1
ttctcgctgtttgcggtccttcactcgccttttctcacttgtccccgtctnctccgatcttgtacgatcatcatctgccggcccttgagatggtcctgctttcggattcgatctcggttccacctacccccccgtcggattgtggcaccactaccgtgtcgacatcatcgcccatgaccagggttacagaaccacgccgtcttacgtcgctttcactgcttccgag

SEQ ID NO: 7345 - DNA, 283 bp, Glycine max
  Clone ID: 701099763H1
tagaaatggcctcttctcttgcatcctcatcaactgttctctggatcctttttctaaccattgcaactcttcatttgagttcagccaggaagttgtccgggtcagacccgcagttgcagtttcaataccacagaggccctctcctcaaaggcaaaatctcagtaaacctcatttggtacggtaaattcaaaccttctcaaaaagccatcgttgctgatttcatcacctcgctctcctctcccaaacccgtcaccgcccaaccatccgttgccacgtggtggaa

SEQ ID NO: 7346 - DNA, 270 bp, Glycine max
  Clone ID: 701099764H1
gctcgagacaagccaagtgaaagtgagaaaaaataaaaatcaaagagcataatgtcagggatcattcacaagattggggagacccttcatgtgggagggcacaagaaggaggaggagcataagggtgagcaccatgctggagaatacaaaggggagcaccatggtgaacacagtagtgagtacaaaggagagcatcatggtgaacacaaagctggagagtaccatggtgagcacaagccagagcacaaagaggggttcctagacaaagtc

SEQ ID NO: 7347 - DNA, 273 bp, Glycine max
  Clone ID: 701099765H1
ggcaagaaggaattggtgctcccaagattgaaaagcccttgcaaaggcacggaggcaggcttgagcacaatgagacttattgtggttcctgttatggtgctgaagagtcagatgatgattgttgtaattcctgtgaggatgttcgtgaagcataccgtaagaaaggttgggcactttcaaatcctgatttaattgaccagtgcaaaagagaaggattcttacaaagaatcaaggatgaagaaggtgaaggatgcaatgtgtatggtttcttgg

SEQ ID NO: 7348 - DNA, 278 bp, Glycine max
  Clone ID: 701099766H1
catttttcttcatcccccaaagtgacaatctttgtattcaattcatcctttctctctctccatggccacttgtgttgatgccccaacccctctttctcggaagcctaacgggtcccaatccgatgatcattccttcaattacatgaaattctgccgacccactttctctgatcgcgttccctgcatacccatttgcaagaatcgtgacactgccttcacacgcgtggaggagtttgacacatgtgtggaggataatgatgatattgaggttgaggttg

SEQ ID NO: 7349 - DNA, 276 bp, Glycine max
  Clone ID: 701099767H1
tctcgagccgaatcggctcgaggttgtgttgtgttgagcagagagactgatcaagaaaggatacgaagaaagagggaatagggctagggttagggttagggttaggttgaggatgccgaagaacaagggaaagggaggtaagaacaggaagaggggaaagaacgaggcggacgacgagaagcgagagctggtgttcaaggaggacgggcaggagtacgcgcaggtgctccggatgctgggtaacgggcggtgcgaggcgatgtgcatcgacgggac

SEQ ID NO: 7350 - DNA, 276 bp, Glycine max
  Clone ID: 701099770H1
agagaattacagagcattttccaacacgattacacgaccgaatcaaaccctctctttctctccgaagctgcgtttaatatcttactcgccttagattgttcttctctttcattatactgttctcttttcgatttgagggaacagtacaagagtgtgaggatcggttaacccaactgcacaggtagtcactaaaataatggagtctcacgatgagactggatgccaggctcctgaacgccccattctttgcattaataattgtggcttctttggaag

SEQ ID NO: 7351 - DNA, 275 bp, Glycine max
  Clone ID: 701099772H1
ggagcatgaacccaaggttgggtgattttggtttggcaaagcttatggatcatgacaagagtcctgtttcaacactaactgcagggacaatggggtacttagctcctgagtatcttcagtgtggaatggcaaatgagaagactgatgtgttcagctatggtgtggtggttcttgaggtggcttgtggaaggaggccaattgaaagagaggggcagaagatggtaaatttggtggattgggtttgggggttgcactctcaagggacgatcattgag

SEQ ID NO: 7352 - DNA, 276 bp, Glycine max
  Clone ID: 701099773H1
ttctattttccggtccggtcgaaaagataaatcggaccggaaaaaaaccgatcttctggccacggactcaaatattgagacgaagagcggtgccattaactactcgtctagaccgcggcacagcacgtcgagcttgaacgaggtgtcgttggaggagccagtctcgcgaaacagcgtgtcggagagtgaaccgcccggtttgggtggcatgatgcggttcgcgtctgggagaaggtctgagtcgtggggagtgggtgattccgaaggccacgtggc

SEQ ID NO: 7353 - DNA, 274 bp, Glycine max
  Clone ID: 701099774H1
gaaaagcattagaatagcgttggaggaggatccgtcatccctcgcaaagtattacttttgcagagctcatcaaaccgaaccttcattcccgccttcacgttttctttcctttcaccaacaacaacttttgtttcttttcctttttattgtattggtgaagcttcaccataattcaattatgagctccaccacttcgaaagccacgtccacgatttgattcctggatccaacgcatccattaagctttcgcgatggcgtggtttagtgggaaaaa

SEQ ID NO: 7354 - DNA, 274 bp, Glycine max
  Clone ID: 701099775H1
ttcgcaccttcgaaaatcaattttctgtcttctctgcgtcttcttcctctatcaatcgttttccatggctcgtaccaagcaaaccgctcgcaaatccaccggtggaaaggctcctaggaagcaactcgccaccaaggctgcaaggaaatctgcaccgacaaccggtggagtcaagaagcctcatcgctatcgccctggaactgttgctcttcgtgagatccgaaaataccaaaagagcacagagcttctgatccgcaagctccccttccagcgt

SEQ ID NO: 7355 - DNA, 272 bp, Glycine max
  Clone ID: 701099776H1
cggctgaagatctcgattagccgaaaattgcaagaacggcttcaggctcttgcgatcaacaaacgcagcgttttgatctcagatttgagggggagagaatggcaacaacagtgagaagtctgaagataaagacaagtacgtgcaaacgtatagtgaaggagctgcattcttatgagaaggaagttgagagagaagctgccaaaacagctgatatgaaggaaaaaggagccgatccctatgatctcaagcaacaggaaatgtcttggctgagt

SEQ ID NO: 7356 - DNA, 275 bp, Glycine max
  Clone ID: 701099777H1
gtggaccatcacatggaagtggtcatttgatggcgccctcgggctctgctgtggggggtttcaaccctggtgtgccggcccaggggttgaatccggtgctttcacaggcgttgactgcattgattaatcagggagctggattggggcttgggaatcttcttggagggcttggtggtgcccccgttaaccagggggggccgcctgctccatatgcgaatcaacctgctatggggtatgggaaccagccagcaatgcaacccggataccagaatcct

SEQ ID NO: 7357 - DNA, 282 bp, Glycine max
  Clone ID: 701099778H1
agaagaagtaggaggaagaaaaggggaaaacgcaaagaaaaaaagaggaagatagatcaagatctcccttgcgtttgtctcagttgaagaaattcaagagcagaacgagactaactcaacggtatcagacgtttcagggtttcagcacttccattttttttttttccggctttgagttggaagaagatcaaagagatgtctgttgtgtttgacatgagttttgatgtccaattcagttttgttcatgttgatgctatctgtacgtaggttcctagttgcttg

SEQ ID NO: 7358 - DNA, 280 bp, Glycine max
  Clone ID: 701099779H1
actcgagccgaatcggctcgaggtttatcggaacgttgctataaacgctgttgttttcagatacacacgtgactcactatctatctatcaatcgatatctccgagttcagccgaaccaaactccgaagctatggcagagctccaaaccaaggttgaacctgttacggtcccggctccggtggatcccgagccaccgctagctgaggctccgccgctcgagaagaaagcggtggcggtgccaccacctgttccggctgcggcagaggaaaccaaagctctt

SEQ ID NO: 7359 - DNA, 274 bp, Glycine max
  Clone ID: 701099780H1
tctttttcttctctctcaacaacttcaccttcttcctcctcgatcatgtctcacttcaagggcaagtaccatgatgagcttatcgccaatgctgcgtacattggcactcctggaaagggtattcttgctgctgatgagtcaacagggacaattggcaagcgtttggccagcatcagtgtagagaacattgaatccaacaggcgagctcttagggagctgcttttcactgctcctggtgttcttcaatatctcagtggtgtcatcctctttgagg

SEQ ID NO: 7360 - DNA, 276 bp, Glycine max
  Clone ID: 701099781H1
cggaggtaaaaaaatacgacaaggagcgaagagtgtgggttaccattgggagactacctgagcgagcagtgtcaatgaatggttggggtcttgccttcagggcatgtggagatatgcttattgtcatcagtggaccaaggactcatggtgagggttttattgaactcaattcatgggtgcccagtgaaggacctccacagtggaatctactcgccagaaaacggtctggcaactttgtctataattgtgctgtgatgggatgttgaagaattgaat

SEQ ID NO: 7361 - DNA, 276 bp, Glycine max
  Clone ID: 701099782H1
cggctcgagcaaacattcaacactcacttgttgctctattcgtaattcagacctcaaactatctcagactcagagacttgtccatcacttcaatcccaaaactcccatagaggaagccgttactcccccaacatcatggtacactcatccctctttcttccaccttgagctcgatcttgtcttctacagaggctggcaagttgtgggatccacagagcagataaaggatccccgtgactatttcactggaagactaggagatgtggaatatgtggt

SEQ ID NO: 7362 - DNA, 274 bp, Glycine max
  Clone ID: 701099783H1
ttctgaatggctttttcaagagttgcattgttaatatgcacggtaattgggtattttgtgcttgcctctgcgggcaatttttaccaagattttgatatcacttggggagatgggcgtgctaagatactcaacaatggcgagcttctcactctgtctcttgacaaagcctctggctcgggtttccaatccaagaacgaatacctttttggtaaaattgatatgcaactcaaactagttccaggcaactctgctggcaccgtcacagcctactact

SEQ ID NO: 7363 - DNA, 274 bp, Glycine max
  Clone ID: 701099784H1
gtgagatttgcgaatctgagaaatggcggattcttctcgggaggagaacgtttacatggcgaaattggcggagaggccgagcgttacgaggagatggttgagttcatggagaaggttgcaaagactgtggaggttgaggagttgacggtggaggagaggaatctcctctctgtggcttacaagaacgtgattggtgcgaggagggcttcgtggaggatcatatcctccattgagcagaaggaggagagcaggggcaatgaggaccacgtggcca

SEQ ID NO: 7364 - DNA, 272 bp, Glycine max
  Clone ID: 701099785H1
gaggaggtggacctactcatcttgctattctgtctcaacctccagacacaatccatggatcacttcgtgtgacagtccaaggtgaagtcattgagcaatcatttggagaacaacacttgtgttttagaacactacaacgtttcactgctgccactctagaacatggcatgcaccccccgatttctccaaaaccagaatggcgtgctttgatggatcagatggctgtcattgctactgaggaataccgttccattgtattcaaggaaccacgc

SEQ ID NO: 7365 - DNA, 276 bp, Glycine max
  Clone ID: 701099786H1
cttccgcgctaattttagggtctgagcaatctggttggtagaacctcttggtcttagagagtcaagttttatgtctggattagacgatcaaattcctactgccttcgatccttttgctgatgcaaatgctgatgactcgggtgctgggtcaaaggagtatgtgcatattcgcgttcagcagcgaaatggtaggaaaagcctgacaaccgttcagggattgaaaaaagaattcagctataacaagatacttaaagacgttaagaaagagttctgttg

SEQ ID NO: 7366 - DNA, 275 bp, Glycine max
  Clone ID: 701099787H1
aggagatggaactcagaagggtgcatctgcaatttttgaggaagtcagaaggcgtggtctcaaagtttcagttgtaggtatccccaaaaccatagataatgatatcccggttactgataagtcctttggctttgacactgctgttgaggaggctcaacgagctataaatgcagcacatgttgaagctgaaagtgttgaaaatggcataggtgttgtcaagttgatgggtagaaacagcggatttattgcaatgtatgctacacttgcaagtcgag

SEQ ID NO: 7367 - DNA, 278 bp, Glycine max
  Clone ID: 701099788H1
ctcgagccggtggaaaacatggctgagacaagtaagaatggagctagtactggttgtgctcaggaacttctaggaggtgaagaggaggaagagagatctgtggcatcggtggaaaatcaacttcgtaaggaaatgactgtatatgagaaatttatcctggggatgctcacaaactttggtagcatggcattagaccgaattcacaatactctcaagatgttttgcattgccgatcccccatatgacaagtcactccagcaactacaaagctttttgtc

SEQ ID NO: 7368 - DNA, 273 bp, Glycine max
  Clone ID: 701099789H1
gaaatgtgatgttgatattagaaaggatctgtatggaaacatcgtgcttagtggagggtctactatgtttccgggaattgctgatcgtatgagcaaggaaattggtgctcttgcacccagcagcatgaaaatcaaggtggttgcacctcctgagagaaagtacagtgtctggattggtggctctatcttggcatcacttagcaccttccaacagatgtggatctctaagggcgaatatgatgaatctgggccagctatcgttcatcggaagtg

SEQ ID NO: 7369 - DNA, 274 bp, Glycine max
  unsure at all n locations
  Clone ID: 701099790H1
ctctattagtctgcatgctctgcaaactgagcatggctcctctcgcattttccttcttcttcatccttatcacattcttttcttcatcatctgaagcgggatccgttggaataaactatggaagggttgcgaacgatctacctacaccagcccgagttgtggagcttctgaaggcacaaggtctgaaccgtgtgaagctctacgacaccgacgccaccgtcttaaccgcgtttgcaactcgagatnccaaggtcgtagttgccatgccaaacga

SEQ ID NO: 7370 - DNA, 278 bp, Glycine max
  Clone ID: 701099791H1
gagcaggaccaccgcaaaaaagttctccgcgaactcaactccctgatctccggctcctcctcctcctccgccgcctccgacgacgtcgacgaggaggtcaccgacaccgagtggttcttcctcggtctccatgacgcagtccttcgtcaacggcggaggacttcccggacaggccttcttcaactccgctccggtgtgggtcaccgggggcgaccgtctctctgcctcggcctgcgagagggcgaggcagggacacgtgttcgggctgcaaaccctgg

SEQ ID NO: 7371 - DNA, 276 bp, Glycine max
  Clone ID: 701099792H1
atttttagttcaagtaataatggtggtactgtaggtgggaagccagaatgcgagtcaaggcagcaggataactcattgcatggttccttggtggttcctcgggtggaagataaatcagcttctgtatctgatgtcacttctggtaggggcctggttgagtcttctactaataccaatagggctagaagtagaacagagaaggagccagttggtaggtacaggcaaaacaatagggtggctatatttcgggaccgtgaggttgaccgcaaagatcct

SEQ ID NO: 7372 - DNA, 278 bp, Glycine max
  Clone ID: 701099793H1
aaacctcttctttcaggtccaattcactcgcttattcttttctttccatacacatgcagacaccaagttcgaacaagttcaggactggcatggacttctttcaccgcgcgaaggcggtgcgcctccgcagccaccacgacaagtacctcctcgcgtgaggacgacgaggattcggtgacgcaggaccgcaaaggctcctcgaaaagcgcgcggtggacggtagaatacgtggctgaatacgataacataattcgcctgaagagctgttacggcaagta

SEQ ID NO: 7373 - DNA, 279 bp, Glycine max
  Clone ID: 701099794H1
attctcttcaacctaacgcagcatcgctatactcttcattccatggctttgcccaatcagcaaaccgtggattaccctagtttcaaactcgttatcgtcggtgatggtggcacaggaaagacaacctttgtgaaaaggcatctcaccggagaattcgagaagaaatatgagccaaccatcggtgtggaggttcacccattggattttttcacaaactgtggaaagattcgattctactgctgggatactgctggacaggagaatttggtggcctcagag

SEQ ID NO: 7374 - DNA, 280 bp, Glycine max
  Clone ID: 701099795H1
gttgggaatcgatgattttgatatggaagaagaggtgagacccgatttcccttgcccctattgttatgaagactttgacatcgcgtctttgtgttctcatcttgaagatgaacattcttgtgaatcaagagtcacgatttgtcctatatgctccgataaagttgcacggaacatgttaagtcacataacgctgcaacatgggcatttattaaagttacagagaaggcgcaggttaagaagagttgctattccaaacagtcagacattgtcccttttgggt

SEQ ID NO: 7375 - DNA, 279 bp, Glycine max
  Clone ID: 701099796H1
ctcgagccgttccttcccaattgggttgcttctcatacacacgctcacttaccattttgtctattcccattatgattctatagccttttaatgttttttttatcgataaatgttaattttactaatttttgtttgtaagatatttaaacccgtcacatctctccttttctctggcctcttatataaccttgactttgttccctttcgtttagcaaacactaagttattatggattcgaattcgcgttaccatgttcagcagcaacaccaacaacccaat

SEQ ID NO: 7376 - DNA, 238 bp, Glycine max
  Clone ID: 701099801H1
attcatcagttataattgataagctgggacataagattctgtccaagaaaattgtagattcaacttctgaggacgaagagacaaaatggcggcggtgggttgataatcatttggtacatgttctgtcaccaaacatatatcgaaatacatctgaagcacttgaatcctttgagtatattacgagcaacggcaatttcagctatcttgaaaaattttcggtgaagtatgctggagctgc

SEQ ID NO: 7377 - DNA, 266 bp, Glycine max
  Clone ID: 701099802H1
ctcattcacaatcccaaattcccaattctctcttccttctccacaccaattgacacctccctaacccccaaattctccttcagcgattcatctctcttgaatcgaatcgatggcacggatgggcccagggttccgattccaccccaccgacgacctgctggtggtgttctacctgaagcgcaagatgaccggaaacctctcccgctacgaccacatcgccgttgtcgacgtctacaagctcgagccctgggaccttccccctctgt

SEQ ID NO: 7378 - DNA, 267 bp, Glycine max
  Clone ID: 701099803H1
gagagagagagcgagcagtttcagacacagagagaggggtttgggattggagggattgacgctgcgtctcttcctcttctctttcgatccatccctcattcctaatcctccaatccaaccacctcagcctcacactcacatatacacatatctgaacgcgtatcgtccctcctatggcttcaaagcgcatcctcaaggagctcaaggacttgcagaaagacccaccaacttcttgcagcgctggtccagtagctgaggacatgttcc

SEQ ID NO: 7379 - DNA, 260 bp, Glycine max
  Clone ID: 701099804H1
ggaatgcagagaaatgagaattgggcattggctcagtccttctgaggcaggtggcgctgccaaacgcagaacctccggcagaaattgccaccgcaaacacgtggaagacgggtagtagtactccatctcccattctctcatattccctttactaattaaagatcatgaacagcgagagacagtcgacgacgacgacgttgctgcacggcaagtacgagctaggtcgtgtgctggggcacggaagcttcgccagggtctac

SEQ ID NO: 7380 - DNA, 230 bp, Glycine max
  Clone ID: 701099805H1
tggaatgcttgtggatattttccttcagatctcagaatatggagggtagacgagacacaaaataactctatattcttaactgatgtgctgaatgggcagtgttcaaaaaatgtgtcattgccaaacaacagccaacagctgtctttgggaaccaatagtacattggaaaatacagacaatagtcaggatggtggtgagaatgagaacaaggcggcagggatggaattctg

SEQ ID NO: 7381 - DNA, 215 bp, Glycine max
  Clone ID: 701099806H1
aggcaacaaaattgatgatgacgatgaagacgaaaacaacaacgattacagctttgcgttttacgtgaatcgcgatcaatcagacaagtcgtctcgctccgccgaagagctcttcgacggtggcaaaatcaagcccttgaacgagtcatcacgtgcgacttctgttgctgaacaaaaaagaggcagagaaagagagagaagttcttcttcaacac

SEQ ID NO: 7382 - DNA, 267 bp, Glycine max
  Clone ID: 701099807H1
ctagattcaagatgccaaggattgaggctaatcattcccttttggaagaaattagggaggttaatcagcgacttattgacacggtagtagacataagtaatgaagaagttgatccaacagcagctgctgctgctgctgaagggacagaagggaccattgtcaaatgctcttacaatgctgtggctctcggtccgagcttaaaatcccaatatgcttcagcacagatgtcaccaattcaacccttgcacttgcttgttcctacaaatt

SEQ ID NO: 7383 - DNA, 255 bp, Glycine max
  Clone ID: 701099808H1
ctcgagccgcataaacataaatagtactaaatccttgtgttgtgttctaagtcctcaatccaacttttcagctatctatcttgaaagaagaagaaatgggatccaacggaacatcttgggctgaccagtgggataacgggcctgacccagtgactgtctccaatgaatcaaagaaaaagaacaacaaggccttcggcaagaccaaggcagttgcttccaccggcgtgaagaagttgaaggagggtactctgttgg

SEQ ID NO: 7384 - DNA, 267 bp, Glycine max
  Clone ID: 701099809H1
gaaaattaatctccctttcattttctctgcatctgtactctccaaaatgccgtccttagaggaggagctcttcccttcaaccccaggcaagttcaagatcgagcgggcccaccacatgaaccgccagctctaccgctgcttcgcctccaccagcaccatgttcctgtgggccctctttttaatcgccctcaccgcttcatatctcagcttccaaggcttcgttgattccggcagccgctacctctccgcctcctggggcgggatcca

SEQ ID NO: 7385 - DNA, 245 bp, Glycine max
  Clone ID: 701099810H1
cttacaagttacatccattgagaaacatgaaggtctcccccttagcattttcaatcctttttttgtccttcaccatagaactcttcattggcattgcttcagcagcacaagaaccagtgcttgacacctcaggccagaagctgagaacaggtgtcaagtactacattctaccagtcttcagaggcagaggtggaggcctaacagtttcaagcagtggcaacaacacatgccccctctttgtggtg

SEQ ID NO: 7386 - DNA, 202 bp, Glycine max
  unsure at all n locations
  Clone ID: 701099811H1
ttgctctctaagctttgattcttcttaattcatacccttcccacacaccataaaacataagaaactggtantctgcctgacatggagtacatgaaccagagactacaatatgattgccttctttttgatttagatgatactttgtatccacaacgtcctggtcttgcacaagcatgtggccaaaacattacagcctatatgg

SEQ ID NO: 7387 - DNA, 185 bp, Glycine max
  Clone ID: 701099813H1
ctttgttcactcttcttctcttgcggctagggttttagcgcagttcttctagatttaaggaagatgggtaaggaaaaggttcacatcagtattgtggtcattggccatgtcgactctgggaaatccactaccactggtcacctgatttacaagcttggaggcattgacaagcgtgttattgagca

SEQ ID NO: 7388 - DNA, 210 bp, Glycine max
  Clone ID: 701099814H1
ggctgagctatattatgctggaagctatggcatggatattcaagggccaacaagagactgcaaatacagcaaagacaaaggagagccagttctttttcaacctgccagtgaatttcttcccatgattgatgaggtgcaccatcaattagttgagaaaatgaaatcaattcctggagccaaggtggagaacaataagttctgctgttctgt

SEQ ID NO: 7389 - DNA, 267 bp, Glycine max
  Clone ID: 701099815H1
tttttacttgaaaaaatcattatctgtgtatttaagaccaatccaaaacaaaaaaggtaaacttgtattttaactaattaaaaaaaactattttctctttcacaagttctgatccccgcagagcctcttttctctttcccatcaaaacccttttctctttcacacactttgatccccgttgatgcttgtttcagatctccaatcagaattagcgagacctccgatcagcgatgacacaacaacccacccttccttgcgaaccctcgt

SEQ ID NO: 7390 - DNA, 214 bp, Glycine max
  Clone ID: 701099816H1
aactaatttacatatacttatacttcaacaagtataacaatgaagacaattaattcattgtttggcctcttgttccttctcctaattgcatttaccatgaagcctgccgttgctagtggtgttcatgacacagatgatcgcatgttagaaaatggagcgtgactacttcatcttacctagttttgatgacgagggtggtggagttacacttgct

SEQ ID NO: 7391 - DNA, 257 bp, Glycine max
  Clone ID: 701099817H1
acgcgaacgcaggcattcggctcgagaatttaacagttttagggcacaaattggcaatgcttcctgtggagcccaaacttggcaagatgctcattttgggagcaatcttcaagtgtttggatcccataatgacagttgttgctggtcttagtgtaagagctccatttgtgatgccgtctgacaagaaggatcttgcagagtctgccaaagcccaattagctgctcgtggctatagtgatcatctggcactcatccgg

SEQ ID NO: 7392 - DNA, 246 bp, Glycine max
  Clone ID: 701099818H1
gcgccacctcccagtttgccgccgtccctctcaacctctgctcctcccccgactccgccgtcgactacgtcgtcaccggctcctggagcgacaaggccgccaaggaggcgcagaagtactgcaagcccaccgtgatctggtctgggaaacccgaaaagtacacaaagatcccatcttttcacgatttggagcagaacaacaattctgggtatcttcatatctgtgccatgagcacctccatggggt

SEQ ID NO: 7393 - DNA, 264 bp, Glycine max
  Clone ID: 701099819H1
aaaaaataaacatatattgagaatggagggttgtgtgaagaagttgctatgccttgttgggtttgtggtgcttgtgagtactattggtggggtggagagtgctggtgaatgtgggaaatctacaacccctgataatgaggcttataagcttgcaccatgtgcctcagcagcacaagatgagaatgctagtgtttctcagagttgctgtgctcaggtgaagaaaattgggcagaaccctagttgcctctgtgcagttcttctctc

SEQ ID NO: 7394 - DNA, 265 bp, Glycine max
  Clone ID: 701099820H1
agagtcctggatgaagacacaggtgaagagctggacagcctaggcaaacttgcaccaacggtggagaaagtaaagcatggatttggcatgaacagcacctagagcagctacataagctaaatgtataaaaaaagattctgcgacaggttggagaaggtgaattttgctccttccttctgattcggtatcgttatttgggacccctgataatggaacaagctggaaatatttgcaagattacttgaacttcttccattgtatgacc

SEQ ID NO: 7395 - DNA, 278 bp, Glycine max
  Clone ID: 701099821H1
tccctcgagctcgagccgctcgagccgcccaagcccaagttgtctttcctgattgtcatcctcagtctctctgcctccgtcggcgcccgccccttcgtccttatcctctcccaggaagactacaaggacgacccccccgccgatcccgactcgcccgccgagtgggatgagttcgcccacggagacgcccacaaatccgaggaggacctcgaccccggctcatggcgccccatcttcgagcctcccgccggagatccccaacccctccccgaatccga

SEQ ID NO: 7396 - DNA, 204 bp, Glycine max
  Clone ID: 701099822H1
atctgtatgaccccatggctgctgctactgctactgcggacagcgtgtcctcgcaggcatacctctcaggaaacgcatgcaggaaacgagaattctgatatcagaactctgtcgccacttctattctctcggatgggtctctggaactggtggcagcatcaccatcaaagtccacgatgactctatttccagaccccaccaact

SEQ ID NO: 7397 - DNA, 263 bp, Glycine max
  Clone ID: 701099823H1
taaaaaataaacatatattgagaatggagggttgtgtgaagaagttgctatgccttgttgggtttgtggtgcttgtgagtactattggtggggtggagagtgctggtgaatgtgggaaatctacaacccctgataatgaggcttataagcttgcaccatgtgcctcagcagcacaagatgagaatgctagtgtttctcagagttgctgtgctcaggtgaagaaaattgggcagaaccctagttgcctctgtgcagttcttctc

SEQ ID NO: 7398 - DNA, 266 bp, Glycine max
  Clone ID: 701099824H1
atcaccctcgcgccctcgctcttcccttcctggtggcgacaatgtcgactcctgctaggaagaggctgatgagagacttcaagaggctgcaacaagacccgcctgcagggatcagcggtgccccccaggataacaacataatgctgtggaatgctgtcatatttggtcctgatgatactccatgggatggaggcacgttcaagttgactctccagtttactgaggattatccaaataaaccaccaactgtgcgatttgtgtctcgc

SEQ ID NO: 7399 - DNA, 264 bp, Glycine max
  Clone ID: 701099825H1
gcgtgacatcgattccaaaggtgcgtttctgctgtgctagggtttctgcatcttccacctccgtcgcgatgaaaccaggcttcatctgattccgatttcccttcgctccttctcctccttaacattcatcttcttcgattcctctacaaattatgattattattatgatgaactccatcttcgcctcgcataaccttcgcgtcttcggtcccggcttgaatcccttcgcaccttattgcatcgccaatcactccttttccttcc

SEQ ID NO: 7400 - DNA, 242 bp, Glycine max
  Clone ID: 701099826H1
ctctctctctctctctctctcttcgttcttttggagtgtgtgtgcacccattgatgacaagcaaccccattgcatggaagcctaagaggaggagaagacgaagaggacaagggtaactgaatcgccgcttctgcagcttcgttctttcgtttttgtttcatctttttagcttcagagggtaaataaaaaatggaggttttggtgggtcccgctttcaccatcgacgttcctcgtctccgcgc

SEQ ID NO: 7401 - DNA, 221 bp, Glycine max
  Clone ID: 701099829H1
gccaaatcattcccacaactagagtgtacggtgtttgatcttccacatgttgttgccactttacaaggaagtgagaacttgaaatatgttggaggggacatgtttgagtcaattccttctgctgatgccattctcttgaagtggatattgcatgactggacatgatgagcagtgtgtgaacatactgaagaaatgcacagaggcaataaagagccaggtga

SEQ ID NO: 7402 - DNA, 211 bp, Glycine max
  Clone ID: 701099831H1
ggcgaaatcggcgtcgaattctctgatgcagagcctgaagcggttcataaagaagccatgggagatcacgggcccgtgcgcggaccctgagtacaaatccgcattgcccttggccgtggagtaccgcctcagctgccccgccaccgtcaaggagaagcccatcatccccaactccctcccggagaccgtctacgacatcaagtacttcacc

SEQ ID NO: 7403 - DNA, 266 bp, Glycine max
  Clone ID: 701099832H1
gacaaatggagttgttcttctacgcggtgttcggcggtttgggagcggttgttgcagtgacggagctgagcaagagcaacaaggaccgaatcaacacctcttccgcattcaattccttctagaacaactacctcatcgtctattccctcatgatggctggagattggctacaaggtccatatgtctactacctttacagtacatatggatatgggaagggagacataggacaactcttcattgctggttttgggtcttccatgctc

SEQ ID NO: 7404 - DNA, 125 bp, Glycine max
  Clone ID: 701099833H1
cttatggtggatacctaggcacccagagacgaggaagggcgtagtaagcgacgaaatgcttcggggagttgaaaataagcgtagatccggggattcccgatataggtcaacctttcgaactggtg

SEQ ID NO: 7405 - DNA, 265 bp, Glycine max
  Clone ID: 701099835H1
taaagacaaagatggtgaggagccacttggtataggccttcaggtgatgctagcagcagctttctcattatttggtatgatcttattaatcatcatcttccatttttgtgtaaaatatttcattagacgccaacaaaggagacgccaaaacgaccttctttatcaaatcagcactcaaattgcaccaattgatgtgagttctgtggagccacgcaactctggccttgaccctttgatcatagcttccctgcctaagctcttgtac

SEQ ID NO: 7406 - DNA, 254 bp, Glycine max
  Clone ID: 701099836H1
ctcgaccccagaagtggtttctgcagctccaattcaatcttctacagcaagcgtaaccgcctcccactccctcccaacaacgccccccccgtcaccaccttcatctcctcccgcgcccaccgcgccaccacagccttcgtcgacgccgccaccgcccgccgcctcacctacacccagctatggcgttccgtggagggcgtggcagcctctctctccgtggacatggggatccgccagggcaacgtggtcctcat

SEQ ID NO: 7407 - DNA, 216 bp, Glycine max
  Clone ID: 701099838H1
ctcgagccgctcactcacaaacacacactgaactaaaaaacatcaaaagagacatggctgagcaaaccttcatcatgatcaagcctgatggcgtccaaagaggccttattggcgagatcattagcagatttgagaagaaaggtttctacttgaaaggtttgaaacttgttactgtggaccgtccttttgctgagaagcactatgctgatttgtctg

SEQ ID NO: 7408 - DNA, 262 bp, Glycine max
  Clone ID: 701099840H1
cccttttgctcttccttagcttctaatcacttccctattggggtatgcgcaagttgaagctgttgaaatagttgtcagttttttctctctcaaagttgtcattttctttgtgggcatttttttttgctgtgtctcagttcctgtttagtatctgggcgggaagttcattgggtttagatctcatctcacaagtggtttctagggtttttccttttggaccaattaggtactaatcttgaacctcaatttggagcattctctt

SEQ ID NO: 7409 - DNA, 254 bp, Glycine max
  Clone ID: 701099841H1
gtcctcttttgtgtttttctgcagatgtctcggtgggtagtagttgatgttcttgttcttgttcttgattcgtgaaagaagaactgaaagcatgaagctctccttctccgtcccatcatccaaaccccactcgaagcccaaagccgtctccaacaccttcgacgacaattccacctcccaaaacgactccggcggaaccaaatacctcatcaccgaattcgacccttccaaacccgctccacctccgtccccaa

SEQ ID NO: 7410 - DNA, 220 bp, Glycine max
  Clone ID: 701099842H1
attaaagataagattatattgctaagaagacaaaatatgaaggttgtctacttgcttgttgccctcttggctttgacatcaactgttgtctctgcctatgaccctagtcctctgcaagatttttgtgtggcagccaaagaaaaagatggtgtatttgtgaacgggaaattctgcaaggaccccaagcttgtcaaagcagaagatttcttcagacatgtgg

SEQ ID NO: 7411 - DNA, 206 bp, Glycine max
  Clone ID: 701099843H1
ctctcgagccgaatcggctcgaggaaagatgtcaagaattggcagcacttcttgtgtgttgcagttggtctttgggcaggtcttattattggatttgtaactgagtactatactagcaatgcatatagtccggtgcaagatgttgcagactcctgcaggactggtgctgcaactactgttatatttggccttgccttgggatacaa

SEQ ID NO: 7412 - DNA, 145 bp, Glycine max
  Clone ID: 701099844H1
ctaccctctaagaagcagtggtggtggcatttgcaagcgatcaatcagcttgagtagaagctctctagctcttgcagttgccatgaacaactctgacagcagtagtagtatcacaagcgaagattctggttccagctcgaattcg

SEQ ID NO: 7413 - DNA, 265 bp, Glycine max
  Clone ID: 701099846H1
tttccctacctctcccttcaagatgcagatcttcgtcaagaccctcaccggcaagaccatcacccttgaggtggaaagctctgacaccatcgacaacgtcaaggccaagatccaggacaaggaaggaatccccccggaccagcaacgtctcattttcgccggaaagcaacttgaggacggccgtacccttgctgactacaacattcagaaggagagtactcttcacctcgtcctccgtctccgtggtggcatgcagatcttcgtt

SEQ ID NO: 7414 - DNA, 259 bp, Glycine max
  Clone ID: 701099847H1
tggtgatgttgttgtcaagaatcaggatttcatcgaggctacccgagaacgaagtctttcctttgtgttagctaagtttgatggattacttgggcttgggtttcaggagatctcagttgaaaatgctgtgccagtatggtacaatatggtgaagcaaaatcttgtaagcgaacaggtgttctctttttggctcaatggtgatccaaaagcgaaagatggtggtgaactaatttttggaggtattgatcctaaacacttc

SEQ ID NO: 7415 - DNA, 263 bp, Glycine max
  Clone ID: 701099848H1
caaattcttcccagtttgcttcaattgtttgttctagggttagggttttcgatccatttccccctcaaatttcaattattcacaagtgcagagcctgattttcctcccgtcgtgctttgaggaggccatgggaggtgacgccactgccgccgctgagagtgcgaccgcggagtcgaacgccgcaaatggagtcaacatcaacattcgctgctccaatggttccaagttttccgttcagattggccttgattccaccatcagat

SEQ ID NO: 7416 - DNA, 264 bp, Glycine max
  Clone ID: 701099855H1
ctctgtctctctgcttgcttcttgttgttgtaactaaggaacaagcgattgcttcttcttcccttttgttttcaaatttcaatttttcatcgggttctctgaaatggagagagatttcatgggtctcaactcaaaagaacctcttgctgtggtgaaggaggagatgcacgtttatggcttcgaagactctggcttcacaaagggtcggattgcacagtggccattctcgaacaaagtatctgcccttccacatttgatgtcttt

SEQ ID NO: 7417 - DNA, 267 bp, Glycine max
  Clone ID: 701099856H1
gtcgctgctcatcctccataacctccgagctctacaccgaagaacgaagccatggggaagacacatggaatgggagctgctcgcaagctcaagtctcaccgcaggaggcaaaggtgggctgataagtcatacaagaaatcccatcttgggaatgaatggaagaaaccttttgccggttcatcccatgccaagggaattgtccttgaaaagataggtcattgaagctaagcagcccaactctgctattcgtaagtgtgccagagttca

SEQ ID NO: 7418 - DNA, 247 bp, Glycine max
  Clone ID: 701099857H1
ccaaggtggaagaaaaaaaggttgaagagaagattgcagaaaagaaagattgaccatgtaactccatttcaagctctctttggttattattagtattttttttttttgcttttttcttctcaccgatattatataagcatgcacaacaaatttgtgcttctttgttcctataattaccactgccatgatgcattcctactactgttagtttgaaaatgtccaatgcctttgcaagtaacttcttaaa

SEQ ID NO: 7419 - DNA, 259 bp, Glycine max
  Clone ID: 701099858H1
cttaattgcctctagttctctcactttaactattttcacaaaccatagaaaaataataattttctctctcattgtaacatgtcttcctcagagggtgtctttgaacagggaattgagttctcagaagccaacaatgttcttctcatgtctctaatggaagaagaacaagaagaagagtactatggcgatgatagacttgtgagcatgattcaatcattggaggcagagatcactgacactgaaatgggtcacatgtatg

SEQ ID NO: 7420 - DNA, 134 bp, Glycine max
  Clone ID: 701099859H1
gctttctcaagcaacatgctgaagcatctggaaatcctctgtgggggcttggtggtcctcatgatgcacctacctatgaccagcccccatacaatggcttcttcaatgatggggcttcttgggagtccacatat

SEQ ID NO: 7421 - DNA, 133 bp, Glycine max
  Clone ID: 701099860H1
gcaccgtcgcaccttccctgaggcttctcttgtctgtcgcgagtgaccatggtgagggttagtgtgctgaacgatgctctgaagagcatgtacaatgctgagaacaggggaaagcgccaagtcatgattcggc

SEQ ID NO: 7422 - DNA, 217 bp, Glycine max
  Clone ID: 701099861H1
cgcaaatatgtttttcgtggacatgttgctgcctatatgaagatcttggcagaagatgaaacagagaaataccagtcacacttcagcgaatacatcaaacgtgggatagaggctgatggtattgaggcactttacaagaaggttcatgctgccatccgtgctgatcctactctcaggaaatctgataaggagcccccgaaggagcacaagaggtaca

SEQ ID NO: 7423 - DNA, 260 bp, Glycine max
  Clone ID: 701099862H1
ctcgagccgatcaagtaatcattcacacaattcctaccctactgtcccaccagttgaccattctagcacggtggatctttctggtcagacttctgttacattgacaagggcttggagccaaatgaacatatctccagctaatggaagggtgttattatcagatacaggtgcttttggtcttgaaacaagtcacttccttgttggaagtggtgctactgctagcaatgctgcttctgtagatgttgggggattccatcatg

SEQ ID NO: 7424 - DNA, 252 bp, Glycine max
  Clone ID: 701099863H1
aagcaacgaggcttccatggttaagtcccttgtagcagacaggctctctttattagttcaaaccacttctgctgtcatcattgcaatgatcataggccttgctgtggcttggaagctagctcttgttatgatagcagtgcaaccactcacaatcctttgcttttatacaagacaagtgttgctctctacactctcaacaaaatttgttaaggcacagaatcaagttccccaattgccatggaggcagtttat

SEQ ID NO: 7425 - DNA, 262 bp, Glycine max
  Clone ID: 701099864H1
gaggagttgcggttaaggatccatctgctccccatggagttcggcttttgattgaggactatccttatgcttctgatgggctagagatatgggatgccatcaagtcctgggtgcatgaatatgtctcattctactacaagtcagatgcagcaattcaacaagatcccgagctccaagcttggtggaaagaacttgtccaagtgggtcatggtgatttgacagataagccatggtggcaaaagatgcaaactcgtgaagagtt

SEQ ID NO: 7426 - DNA, 218 bp, Glycine max
  Clone ID: 701099865H1
cggctcgaggggacttggcttgtttttctcttttatccacttggtaacttcggctattgtcgaatccgtaaggcgacggagagcaatcaaggagggatatcttaacaatgccaatggtgtgttgcatatgtctgcaatgtggcttttcccacaactttgcttgggtggaatagctgaagcattcaatgcattaggccaaaatgagttctattacacag

SEQ ID NO: 7427 - DNA, 261 bp, Glycine max
  Clone ID: 701099866H1
cgggctatttaagccctttgattcggttttgacaaatctgttggtcttcagtatctggcatatcattgaactccttttgggattggaacttgatatgatcatttgtattggggagtaagaccttgttacttttgcaaatgctaaattttaataggatcagaagtcagcccaggacaaccagatctatgtctttgggaggcatggattacgtggatccaaaaaggaaaggcaattttgttggaaaagtttttcttgctgcag

SEQ ID NO: 7428 - DNA, 241 bp, Glycine max
  Clone ID: 701099867H1
aaaatataacaaataatttgtactttcatcaaaacaaaatcccgttgtatttttctcagatggctcgaacgaagcaaacggcccgcaagtccaccggcggcaaggcgccgcggaagcagctggcgactaaggcggctcgcaagtcggctccggcgaccggcggcgtgaagaagccgcacagattcaggccgggaaccgtggcgctgcgcgagatccggaagtatcagaagagcacggagct

SEQ ID NO: 7429 - DNA, 266 bp, Glycine max
  Clone ID: 701099868H1
ctatcgagccgaatcggctcgagcgtgcatgattacagagacagagattataggagaagaagtcgcagcagaagttatgataggtatgaacgtgacaggcatcgtgggagagacaaagattatcgtcgcagaagtaggagccgtagtgccagtcttgattacaagggtcgtggtagaggacgctatgatgatgagcgtacatagtagaagccggagcagatcagttgatagccgctcccctgcacgacgcagtctagtcctcgaag

SEQ ID NO: 7430 - DNA, 264 bp, Glycine max
  Clone ID: 701099869H1
atagttttctcacaaaggaggaagaatggcatctttcatttcactctctttgttgcttctctttctcaattaccccttcctttccctctcaaccaaccctgaagaatggcatccaacaggggtcaaggtggaattcagcagttgttggctgctgaacaagaggcacaacggattgtgaatgctgcaaaaaatgaaaaattggctaggttgaaacaggccaaggacgaggctgaaaaggagattgctgaataccgagctcaacta

SEQ ID NO: 7431 - DNA, 219 bp, Glycine max
  Clone ID: 701099870H1
ctcgagccgtttggagtgtgtgtgcacccattgatgacaagcaaccccattgcatggaagcctaagaggaggagaagacgaagaggacaagggtaactgaatcgccgcttctgcagcttcgttctttcgtttttgtttcatctttttagcttcagagggtaaataaaaaatggaggttttggtgggtcccgctttcaccatcgacgttcctcgtctcgc

SEQ ID NO: 7432 - DNA, 256 bp, Glycine max
  Clone ID: 701099871H1
cttccctcgagcccaaaaccgcgtcgttcactcacaacgacggccgttccgtcaacctcctccaggacgacggcaccatccccatgacgttccaaggcgtcacctacatcatccccgtcgtcatctggctcatggagtcctaccctcgccacccgccctgcgtctacgtcaatcccacgcgcgacatgatcatcaagcgccctcatcctcacgttaacccttctggcttggtttccgtcccttacttgcagaattg

SEQ ID NO: 7433 - DNA, 260 bp, Glycine max
  Clone ID: 701099872H1
cggctcgagctcatcacatctcgcgaatccaagccgaaggggaagggggtttgataaaggttgacattgaaatttgaagccatggttcttgactccattctgacatctcctcgtctcaagtctccatctttcaggagacagtttaaaaaggatgaactgggtagttggtccacacttttccagaggcatcgcttcctcttatctgctcttgttctgctaactctcctctgcactgtttcatctttactttgctgtcactt

SEQ ID NO: 7434 - DNA, 259 bp, Glycine max
  Clone ID: 701099873H1
aagcgagaagcgagaagcgacatggatccagacgcgttggcaaaggcattcgtggagcactactactccaccttcgacaccaaccgcaacaatctcgccaatctctaccaggaaggttccatgctctctttcgagggtcagaagatccagggctcccacaacatcgtcgccaaactcacctcccttcccttccaacagtgccagcactccatcaccaccgtcgattctcagccctcaggcgtcaaacgcgccatgctcg

SEQ ID NO: 7435 - DNA, 222 bp, Glycine max
  Clone ID: 701099874H1
cggacacaaacgttgtcactacgaaggtaacggtaacggaaataacaacaacagtaacagcgttgtcaccgtcgcctcggaaggcgtggggtccacccacactgtcagtcacggccaccaccgcgacttcgatctcaacatcccggcctttccggatttttcgaccacaggtcggagaagacgaggttgagagccctcaccctgtcatgaagaagctcgctc

SEQ ID NO: 7436 - DNA, 240 bp, Glycine max
  Clone ID: 701099875H1
ctcgagccgctcgagccgaaaaaataaaacaacacataataagcaagcaaaacacacacaaagggaaataacatatattatacacaaaccaaaccatatatcttattctattttctccctctccaccactccccttctttctcctcctcctcaaccttaatcatggagaatattggagaagagtacaagcattactgggagaccaacatgttcctccaaacccaagaacttgacagttgg

SEQ ID NO: 7437 - DNA, 132 bp, Glycine max
  Clone ID: 701099876H1
gcgggatggaagtggaggcagtgcaacaacagcgcaaaggagcgcacctgaagaagagggctctgaagaacaaagctttgggcatcactttcaacgagaaagatctcactgactacgtcaccggctttcaca

SEQ ID NO: 7438 - DNA, 165 bp, Glycine max
  Clone ID: 701099877H1
ctcttgcttcttgcttctattacttgcttctttcttcaccatgtcacttgctgggaaaatcaccactgaaattggggttcatgcaaccgctgcaaagtggttcaacctctttgcaacacaacttcatcatgttcaaaaccttactgatagagtacatggaaccaa

SEQ ID NO: 7439 - DNA, 256 bp, Glycine max
  Clone ID: 701099878H1
ttggaattcaactcttctctttctctttctcttctcttctgtcgaagaagaagaagcagaagtagttacagaaccatgctggagaatcttcaggctcctccgccaacggaatcggccccagtggtgaagcgctatgctcctcccaaccagaggaaccgttctgccaacaggcgcaaatcatctgatcggcttgatcggacaaacagtatcgggaatgacttagaaaagaatcaagttgcttattcaagagtgttca

SEQ ID NO: 7440 - DNA, 209 bp, Glycine max
  Clone ID: 701099879H1
cctcagccatgtccttgcaaccaaacttggtgctcgcctcacagaggttaggaagaatggcacctgtgcttggttgaggccagatggtaagacacaagtaaccgtcgagtactacaatgacaatggtgccatggttccagttcgtgtccacactgtcctaatttccacccaacatgatgactctgtgagcaatgatcaaattgctgcgg

SEQ ID NO: 7441 - DNA, 263 bp, Glycine max
  Clone ID: 701099880H1
agaccagcgtgcaggttcttcaatcttctagagagagaaagttaaagattgaaatttggatcggagagagagagagagatggcgttgaatcctcaattgtttcctaatggaatgcccgttcctttcgtgaacgagatgtttgtgttggccagagacggcgtcgaattcgaggtcgataagattcctgcctctggaaatcatgggggtcatctcaaaacaaagggaatcgtgtatttgtcaaatattcggatggtcttcgttgc

SEQ ID NO: 7442 - DNA, 259 bp, Glycine max
  Clone ID: 701099882H1
gatttgtaagcggtcgccagagaagttgtttcgcattttggacatgtatgaggctttgagggatgctatgcctgatttgcaggcaatggtttctgatgagtttgtgattggtgaggccaatggagtgctgagtgggcttggtgaggctgcaaaagggacttttgctgagtttgagaattgtattaggaatgagacttccaagaagccggtcataaccggggatgttcatcctttgcctcgttatgttatgaattatctc

SEQ ID NO: 7443 - DNA, 263 bp, Glycine max
  Clone ID: 701099883H1
cagaattctctaaaagagatctttttctgctctttgaagaaagaagggtctttgctagattttggagatgtctctgctctcagatctcatcaaccttaacctctccgataccaccgcgaaggtgatcgcagagtacatatggatcggtggatcaggaatggacctgaggagcaaagcaaggactctcccaggaccagttagcgacccttcagagcttcccaagtggacatatgatggttccagcacaggtcaagctcctggtg

SEQ ID NO: 7444 - DNA, 156 bp, Glycine max
  Clone ID: 701099884H1
ctgtcattgaagaaataaaagtgaagttctaattggtgttattgagcagatagcatggagccacagtgtagaatcaagaaggatgccactgaattgatagggaataccccaatggtatatctgaacaacattgtggatgggtgtgtagcccgtatt

SEQ ID NO: 7445 - DNA, 181 bp, Glycine max
  Clone ID: 701099885H1
ctcgagccgtcggctgcagctggtgaatcgactgtgttttactatacgatgaaaggagattattatcgttatcttgccgaatttaaggcaggcaatgagaagaaggaagctgctgatcagtctatgaaagcatatgagtctgctaccactgcagcagaggctgatttacctccaacacatc

SEQ ID NO: 7446 - DNA, 260 bp, Glycine max
  Clone ID: 701099886H1
gttttctggtcagagattctatgatgattggtttcagtcattatataatgttatcttcacagcacttcctgtaatcattgttggattatttgacaaggatgtcagttcatctctatccaagaaatatcctgaactatacatggaaggaataagaaatgttttcttcaaatggaaagttgtggccatatgggctttcttttctgtataccagtctctaatattcttctattttgtgagtactacaaatttaagtgctaaaa

SEQ ID NO: 7447 - DNA, 261 bp, Glycine max
  Clone ID: 701099887H1
tttctctatttttcctccgtttctattgcaatttctcaattactacatcgtattctgcaaattcaaactgggtcttggttttctgaaagatgggaggtggcaaggacaagcaccatgatgaatctgacaaaggaattttttcacagcttgctcatggggtagctggtgcagcacatggtggacatgggtacccacctggggcttacccaccaccacctggggcataccctccgcaccaagggtaccctccacaacatgggt

SEQ ID NO: 7448 - DNA, 234 bp, Glycine max
  Clone ID: 701099888H1
atagtttccaaaggcacgcagcgagtttaggcgcggcgggatcatcacgagattgcaaaatgaagttcaacattgcaaatcccaccactgggtgccagaagaagctggaaatcgatgacgacctgaagcttcgggcattttgggacaagaggatctcccaggaggtccttggtgacgccctgggtgaggagtttaaaggatatgttttcaaaatcactggtgggtgtgacaaac

SEQ ID NO: 7449 - DNA, 228 bp, Glycine max
  Clone ID: 701099889H1
ggagtttcctgttaatgttactgacaatgagttgatcaataaactttcttcagaaaatgaacatcttaaggaactgattaattcactggaaaagaaaactatacaggagtttcctgttaatgttactgacaatgaggtgagcagtaagctcattacagaaaatgaacatcttaaggatcaggttaattcattggacagcacaattgatgacgctgagaggaaatatga

SEQ ID NO: 7450 - DNA, 262 bp, Glycine max
  Clone ID: 701099894H1
atcaccaccgcatcttttacctcccaccaaccgcaccaaagccatcatcctcctccgcctctaacatcaccaccacaacaacaagaacaagaagaaagagaagcaaggagagagagaagggttagaagggtgaagaagcatgtcttcactcaagaagaagaaaccctattacccgcttccgttaattcctatctagtactactactttacttctgattcaaaagggtgatcttcttcttcttccaagcttatcaattatcat

SEQ ID NO: 7451 - DNA, 262 bp, Glycine max
  Clone ID: 701099896H1
ggtttagcgaaggcgtgtaagccccaatttgcttcattatcagcaaaacgaaaaagtgcaatgggtgcagtttacttttctcaatcatgttacaaacctaggcaaattttcaatttggagagagaaagcactttggtgggaagatgtcctgttgttcagattagatgccggagggttgtgagtgcgtgtcttaacgtggatgttgatgcacctaatacagggactacaacatcggagaagaagaaaactaaggatgtgatcg

SEQ ID NO: 7452 - DNA, 298 bp, Glycine max
  Clone ID: 701099901H1
tgcagactcagcctgtggaggaattttaccgttcgagaggaaaattattggagtttaacctgcctggaggaatcccggaatcttggcctaagttgctacatgctcttaatcttgatgattacgaggacaaacgatctgctgcagcataaagatataataatgtatcataacagtaagtatttcattctttgcgtgcttatattgcatgcttggcaattttgcaggacagagaaccacagcaagggaacttctctgctagtattattttggaccaatgatgatatttgtaagtgttgta

SEQ ID NO: 7453 - DNA, 299 bp, Glycine max
  Clone ID: 701099902H1
attaacacacacaaacagaggctacgtacgatcaaattaattaagatggcggaagtgaggaacaaacaagtggttctgagggactatgtgagtggttttcctaaggaatccgacatgaacatagttgaaggaaccacaatattgaagcttccacaaggttccaatgatgtgcttctaaaaatctctacctttcctgtgacacttacatgagaatgctcatgaccaaggtggaaggcctcgacgtgtttggcacctatacacctggctcctcattaacagggtatggagtgtccaaagtc

SEQ ID NO: 7454 - DNA, 291 bp, Glycine max
  Clone ID: 701099903H1
cggctcgagttggagtccggacatgagagagagagagagatgagggaggtgtaagaaactggacggagtaggtgttgttggcattctgacctaaagcttgtgtctttctgcttcgtttgtatcttctgctgcgtaaagaggatccctttctgattcttccgtaaatttcgtctctgaaactagggctaatacttcatctaccgatctctatattctggtttttccagttcttggaaggaaaatgatgaaggtttgcttttgatccggcttgggagttttgatcgacttgat

SEQ ID NO: 7455 - DNA, 299 bp, Glycine max
  Clone ID: 701099905H1
aaacatttctcattcctttgaagcatgccggggttaacgtgcaacgcttgtaacaccgaattcaaagatgacacagagcaaaagctccattacaaatccgagtggcatcgatacaatctcaagcgcaaggtggctggggttcctggggtgactgaagctctatttctggctagacaatctgtgcttgctcaagagaaaaataaactgggtgaaactcccatgctctactgctgtggtctttgtggaaaggattataaaagttccaaggctcatgctgagcaccttaaatcacgtggtca

SEQ ID NO: 7456 - DNA, 298 bp, Glycine max
  Clone ID: 701099906H1
cgagccatttgggagttaggttctgcacgctctgcttccagcgagtgttctttcttcgtttcaacaccttaatttgcacacgctgcttcttcagcttgagaaatggcacaagaaacctttctattcacatctgaatctgtaaacgagggtcaccccgacaagctgtgcgaccagatctctgatgcagtgctcgatgcgtgccttgaacaggaccctgacagcaaggttgcctgtgagacatgcaccaagaccaacatggtcatggtctttggagagatcacaaccaaggccaacgtag

SEQ ID NO: 7457 - DNA, 295 bp, Glycine max
  Clone ID: 701099907H1
ctttgtgttcccaaaaggtttggtgcactatcagaagaacaatgcggataagcctgcttctgtgctttctgccttcaacagccaactccctggcacagtgtctatagctgcaactcttttcacttcaacaccaactgtgcctcataatgttctttctcaggccttccagattgatgctaaactggttgatgacatcaaggccaagcttgctcctaagaagacttaatttatgttgagcttatgatattccagagaggaagattatgataatagtttcataattaagactactttc

SEQ ID NO: 7458 - DNA, 286 bp, Glycine max
  Clone ID: 701099908H1
gatagcttgaggctcagatgtcgtattgctccatcaatatgcttgtcaccggcagctttaagtggaagtcaaggtgtgtatcctcttgtggttgctgctcatcctctagaacccaaccagtttgcggttgggttgacggatggatctgtcaaagtgatagaaccgaacgagtcagagggtaagtggggaacctgcccaccaacggacaatggaatattgaatggtagaacaggatcatcatctacaacaagcaaccacactgctgatcaggctcaaagataaacga

SEQ ID NO: 7459 - DNA, 149 bp, Glycine max
  Clone ID: 701099910H1
cccaccgacctcccggaccaacaaccccggttcgggttcggactcgcggtcggggtcggcggtgagattctcccggagacagtggaaaacatgctctcgatctgcgaccacgtgttcgtggacattcaggctctgattcgcaggttcga

SEQ ID NO: 7460 - DNA, 296 bp, Glycine max
  Clone ID: 701099911H1
ccacttttcactgaacacttattactcactccttcatggccacttcgctctctttctccatttctcccaaaaccactgccacaacctcagccttccgattcaaagtctccgccatggctaccaccatcgccgccccttctaccaaggtggctcccgccgtcattgtcggcggcggaagagtgggtagggccttgcaggacatgggcaccggtcaagacctcctcgttcgccgaggagagtccgtacctcccaattttgagggtcccatttttgtgtgaccaaggaccgatgatctt

SEQ ID NO: 7461 - DNA, 284 bp, Glycine max
  Clone ID: 701099912H1
gagacattgaaactgagctgtccactgctgctcttagtccacagccgtttggggtgccaggcattccttttaagcctggatgctcaagtgatattgccatcaatgatcctggggttttgaataatggcttgtgggctaatcagactcaacgaatgcgaacatatactaaggttcaaaaatgtggctctgttggaagatgtattgatgtcacccgttacaaggggtatgatgaactccggcatgatttggctcggatgtttgggattgaagggcagctagaagat

SEQ ID NO: 7462 - DNA, 151 bp, Glycine max
  Clone ID: 701099913H1
attttgaggaatcaatgaaatatgctcgaaggagtgttagcgatgctgacattcgcaagtaccaggcattcgcccaaacattacagcagtctagaggatttggaagtgagttcaggtttgcagattccacctccgccggtggtacagctgc

SEQ ID NO: 7463 - DNA, 294 bp, Glycine max
  Clone ID: 701099914H1
ctcggcgtcgccatggacgaagaagaggtgcgcaagatcttcagcaagttcgacaagaacggcgacggcaagatctcgtgcgcggagccgaaggagatgatggcggcgctgggatccaaaacgacgtcggacgaggtgaagcgcatgatggcggagctggaccggaacggcgacggctacattgatttgaaggagttcggcgagttccactgcggcggcggtggcgacgggagggagctccgggaggcgttcgagctgtacgatctggacaagaaaggctgatctcggcgaaga

SEQ ID NO: 7464 - DNA, 285 bp, Glycine max
  Clone ID: 701099916H1
cgccacctctggttgccgttgtaaatgcccaactctatgctgctgattatgctgacatggaggtaagcaaatacgacaaggagcgaagagtgtgggttaccattgggagactacctgagcgagcagtgtcgatgaatggttggggtcttgcattcagggcgtgcggagatatgcttattgtcatcggtggacccaggactcatggtgagggttttattgaactccattcatgggttcccagtgaaggactccacagtggaatctactcgccagaaacggtctggc

SEQ ID NO: 7465 - DNA, 254 bp, Glycine max
  unsure at all n locations
  Clone ID: 701099917H1
caacccacaagaatccctccctttctggctttctctctctaaaactatcatgtcctccaccgcggctcccgtccttcccatatccaacccccaaaccaccgccgcacgcnggcgccatcgaggctccggcgaacaacccggccttccgcgccttcatcaacaacctctccgcgtccctccgacacggcctcgaccagcgccgcccgtggtcggacctcggggaccgctccgagttctcgaagcccgagtccttc

SEQ ID NO: 7466 - DNA, 297 bp, Glycine max
  Clone ID: 701099919H1
tggatgtgcactgattgtcaactataagtttgttggtcactattaaattcatgccccatatgtactggatgaatgattattttgaggtcagtgtattgtctacaagtatttatttttcaacattctcccatcctcccttgtgtaatcttttcatgtgattttttggggacttctgtatggttggaaacttattttaaatgtacaagtgtctaaagaaagggcaaattgcccaaatttatgattatttttactggaagtgtgatgaaacattattgtgacacgaaaaaatttcataat

SEQ ID NO: 7467 - DNA, 294 bp, Glycine max
  Clone ID: 701099920H1
caatttaccagctatacttgttccttttgaaggttagaagtgctacaatacaaacaatggcagctactcaggaagatgtgaagcttttgggtattgtgggaagccatttgtgtgcagggtccagattgcccttaagttgaagggagttgaatacaaatttttggaagaaaatttgggcaacaagagtgatttgcttctcaaatacaaccctgttcacaagaaggttccagtgtttgttcacaatgagcagcccatagcagagtctcttgtgattgttgaatacattgatgagac

SEQ ID NO: 7468 - DNA, 277 bp, Glycine max
  Clone ID: 701099921H1
ctgctggggactctaacgagattggagccagtcccgacaatgcggcgtcgtataacggaaacttggttaaacgcgtgttgagtgggagtgggacccccttgaagcaaaatgagtcactcgatgttttcctcttcgcgcttttcaatgagaaccagaaaacgggtcccacgtcggagagaaactacgggctgttctaccccactgagaagaaggtttacgatattccgctcacggcggaggaaatcaaggaggcgccgccgtcaggagtagggaagag

SEQ ID NO: 7469 - DNA, 295 bp, Glycine max
  Clone ID: 701099922H1
cacatagcactcagcaataagaaggtccctattgtgattttccttcacggtggaggcttttgcttcggttcgcgcacctggccccatattcacaactgttgcatgcgcctcgcgtcggggctccaagcggcggtggtttcgccggactaccgtctcgcgccggagcaccgtcttcctgctgcggtggacgacgccgtggaggcggtgaggtggctccagaggcagggcctgagcttgagggaggacgcgtggttgagtgggggcgttgactttgaccgcgtcttcgtcgtgggtg

SEQ ID NO: 7470 - DNA, 286 bp, Glycine max
  Clone ID: 701099923H1
ctttgttgctcgtctagggactaggatggagtatttacgtttaagcctgtttctgtgcatgctgtcactgtcagcgacttcgccttcttccttcgcatcgccaaattcgatccgtgccgattatgccgttaatctgaacgcaacgaacttcgatgctgttctcaacgatacccccgctactttcgcccttgttcaattctatgcccattggtgccctgcatgcaggaattataagcctcactacgaaaaggttgcaagattatttaatgaacctgatgcagtgcat

SEQ ID NO: 7471 - DNA, 296 bp, Glycine max
  Clone ID: 701099924H1
ccggttcagcgctccgcctcctgcctctctttcttccttctccagcaactccggcagtcaccggagtgccagcgctaatgccaccgccattcctccgatttcggtcgccaggcctaacagatctccttctcctgcggtcggaactttgtagagcatactcattcggtacgttcaacatcagccggaagaccggcagtttcagttcgctcggcggcagtggtggctccgaacaaatccacactccgaacgcctatggctatacctcctattgaccctactaccaatcggaatagaga

SEQ ID NO: 7472 - DNA, 295 bp, Glycine max
  Clone ID: 701099925H1
cacgcacgtctctctctctctctcgccatggctatggctatgcaaagcggaatcggagtctccaagatcctcatcatagcaggagcaggttacaccggcaccgtcctcatcaaaaacggaaaactctcggatttaatcggcgagcttcagttgctggtgaagggattggaaaaatctggggagcatgctgaaggtgaaggtgaatatgctgatgccatagctgctcaggtgcgtcgcctggcgaatgaagttcggcagctagcatcaaacaggccaatcacagtactgaatgggg

SEQ ID NO: 7473 - DNA, 293 bp, Glycine max
  Clone ID: 701099926H1
ctcttgatgcacgtcttgatgtagttttccgtaaaaagcttccagagatccgaaagcagctctttggacaaattgttgcttgaagattttgattgtaatgtttggttacccctggaactatatcccgaagcataagcttgtcttcatgtcttggacctgaatagctatcaagccattgcttctgtgaacttataattattgtcccttaaattacgtcattttcggtagtccagttgtccggcgttctagatttgatttacttatgattgttatgacgacaagtgttttcagct

SEQ ID NO: 7474 - DNA, 283 bp, Glycine max
  Clone ID: 701099927H1
ggacttttatgctcctcttttcttctctgaagtagctacaattcagcctggagaattctgccacaaggtcaatctctgtcagaaaattgcatatattgccttgaaagttcaagatgatagctgtgagttttgccaagatactgtttcaactctattggaaaagttgaaggagagtgatactaagctagagataattgagacgttactaaaggtgtgcaattcagtggagaagtatgcaattaagtgccagagattggtttccaagattggcactggtttttga

SEQ ID NO: 7475 - DNA, 291 bp, Glycine max
  Clone ID: 701099931H1
ctttctgattgccttcaaatcacacactctcttcaatttctagggttttgctattgctttgcctccgttccccctttctcacaaaaacaacgccttttctcttctccttcgtatctattctttgcgcttcgtcttcggttgattgaaggcattcacagcgtaatttgttgctgcattttaatcgatttatctaaccaggactgattgagctaatggagtctaaatctgggaaaaagaagtctagtagtagtagtagtaaatcaattttttacgaactcccctcggatacag

SEQ ID NO: 7476 - DNA, 293 bp, Glycine max
  unsure at all n locations
  Clone ID: 701099932H1
attatttcatcgattctctcccttctctttctctctgcgacaccagatgatggagacgacggcgaacgaaacgctgtcgttgcgccaatcgcggcgttgttgttggtggtgctactcgcggcgagtgtggtggtgcangctcaggagaactcggacgtgaagacgctggtgaagcacatgcacgggaagaagtactgcgacaaaggatgggaatgtaagggctggtcaatttactgttgtaacctcactattactgattatttccagacctaccatttcgagaatctcttctc

SEQ ID NO: 7477 - DNA, 290 bp, Glycine max
  Clone ID: 701099933H1
cttcttcccaaccactactactcactcactgcagatctcaattgaatcgctgtccatggctaccatcgttagcatcaaggcccgccagatcttcgacagtcgtggcaatccaactgtcgaggtggatttgacttgctccgatggtacttttgccagagctgctgttccaagtggtgcatccactgggatttatgagggccttgaattgagagatggaggatctgactaccttggaaagggtgtatcaaaggctgttgacaatgtgaacaccgtcattggccctgctttga

SEQ ID NO: 7478 - DNA, 281 bp, Glycine max
  Clone ID: 701099937H1
ccgcaatgatgaagtgtttctcggtgtccttatcctctttatgggttctccttgctctctgttctctcagtgtgttatcgcaaaatatatctcagagtggcctacagcaagctagcctcccaccaagaggttggaattcctatgattgcttttgctggacgatttctgaagaagaattcttacaaagtgctgaaatagtttctcaacgtctcaaggctcatggatatcagtttgtcgtggtggattacctctggtataggaagacagtcacgggtgcttat

SEQ ID NO: 7479 - DNA, 292 bp, Glycine max
  unsure at all n locations
  Clone ID: 701099940H1
caggttctgaccttggaggatgttgtttctgaggctgatatctttgtcaccaccaccggtaacaaggacatcatcatggttgaccacatgaggaaaatgaagaacaatgccattgtttgcaacattggtcactttgacaatgagatcgacatgcttgggctggagaactaccccggcgtgaagcgcatcaccatcaagccccaaactgacagatgggtcttccctgagaccaacaccggtatcattgtcttggctgagggtcgattgatgaacttnggatgcgccactggac

SEQ ID NO: 7480 - DNA, 287 bp, Glycine max
  Clone ID: 701099941H1
atcaagtatgtctttgagccaaacaagaaaactgcttaaaagtattgagcggtttcatgttttagaaatcaaagattatgcatttttgttgcgggctacatagatcactctttatttcattgttatttcgttgggttttgataagaaccttactagaaaagctagccatgtagttcttgttctcatagctacaagtgattccagtttcagcatagttccatcatgttactgtgtttagagggtgacagtataataattgggccagatatggttcctaagttaacatt

SEQ ID NO: 7481 - DNA, 288 bp, Glycine max
  Clone ID: 701099943H1
gcgcagaacaactctggcggcggcgcaggagacgcgcagtctccgccggtttccggtggcggcgtggagagcggacacgttccggctgagtcgtttatgtacagctgtcaccttccttcggatgtgatttgggctccaacccctagaccacctttctgatcatcatcaatcaactctatttttaattcgtgcttgtgttgtgaattttgtttcgttaatctagttgtttgagttgtaatgctgctgttagcttatttagttctagttctaaattcaaaaacaatgatt

SEQ ID NO: 7482 - DNA, 274 bp, Glycine max
  Clone ID: 701099944H1
actcgagccgaatcggctcgagggcaatacttagcccaccacgggtacttgtcactcgaagagtagcgacccatattttgatcaaattggctgttctcatcctggttgtgagccagcttaccggactcccaagtgtgttaaaaagtgtgtaagtgggaaccaagtttggaagaagtcaaaacactatagtgtcaatgcatacagagtgagctctgatcccatgatatcatgacggcagtttacaagaatgggccagttgaagttgcattcactg

SEQ ID NO: 7483 - DNA, 288 bp, Glycine max
  Clone ID: 701099945H1
gccagaggactttcttttcttcataatgccaaatcacaagttatataccgtgattttaaagcatccaatatcctactagacgcagagttcaatgctaaactctctgattttggcttagcaaaggctggccctacgggtgatagaactcatgtctctactcaagtcatgggaactcaaggatacgcagcacctgaatatgttgcaacaggtcggctgacagctaaaagtgatgtatacagctttggggttgtgttgcttgaactattgtccagtagacgtgccgttgac

SEQ ID NO: 7484 - DNA, 160 bp, Glycine max
  Clone ID: 701099948H1
attcggaagagcttcaaagtcatgatttagctgatgctgtgaagcaaatgaaagaaaagcgcaggtttaaggagcttctgataatggtggacacctgccaagcctctactctgttctcccagcttcattcaccaggtgttttggcaattggaagtagtaa

SEQ ID NO: 7485 - DNA, 291 bp, Glycine max
  Clone ID: 701099949H1
attcggtgctccgaatctcagattctagggttagggttcccaatttctccaccgatcagaaaatgagttcaactggaggttctaccaagggcggaaggggcaagcccaaagcctccaaatccgtttcaagatcgcagaaagctggtctccaattccccgttggaagaatcgctcgattccttaaggctgggaaatacgccgagcgtgttggtgctggtgctcctgtgtacctctctgcagtgctcgaatatctcgctgctgaagttttggaattagctgggcatgctgcta

SEQ ID NO: 7486 - DNA, 293 bp, Glycine max
  Clone ID: 701099950H1
gacgcagcctccgacgcggggcattaccgccattgaagctgattcatgcttttttcaccgttcctcacaagaccaggtttcaagctattgccattggaaattaggacttcttttttgttactgaaaaattagagtagacaaaaaatgctcagacggaggctatctgttctctcaacatcaatcaccagaagctcaaattatagcaaacccagtctcggatacccatctatccaatctcatccctttcagctccctcactctcccagtgcttatcaaataattagtcctaatgc

SEQ ID NO: 7487 - DNA, 289 bp, Glycine max
  Clone ID: 701099951H1
ctctactggttctacgttttctcatgaactaactccctctcaatcccctaccctaattcctccaatttccccattttttttctaattaatcagatttgcaaaatcctaatttctctattctaacaaaaaccccaaattcaaacaaatccaatggcttcgattccgcgtccggcgagttcgggatcttcggagggaggaggagatccggctgcgatggacgagagaacgaggaagcggatggagtcgaaccgcgagtccgcacggcgatcgcggatgaagaagcagaagc

SEQ ID NO: 7488 - DNA, 277 bp, Glycine max
  Clone ID: 701099953H1
tgggaacatgctacccattaatatggtcgattgacatgctataacacatgatccacttgtggtgattgtcaatgagggaagcgcagtgccagtgagattttagccggggcattacatgataacggtcgagctattcttgtggggcacaaaacatttggtaaaggaaagattcagagtgtcactcagcttcatgatgggtcagcatctttgttacagtggcaaaatatctatcaccagccctcatgacatagatcaggttgggataacccagatgtgc

SEQ ID NO: 7489 - DNA, 283 bp, Glycine max
  Clone ID: 701099954H1
ctgcttttctcttccctctatcgtttgttctttccttcattcactctcgccgccgcgcgtgctaaaaaccgtctattccagaatgggcagcgagggcgtgccgtcgacggtggcggaggtcatgtcggtggcggccgtcgagctcactgacgcctccagctggtggcacgacatcgacgactctccgctgtggcaggatcgtatgtcctacactctcgccgtactctacggtatcgtggccaccgtagctttggttcaactggctcggatacatttgagagtg

SEQ ID NO: 7490 - DNA, 288 bp, Glycine max
  Clone ID: 701099955H1
attgaattcaaggataaagttaagaatgttggtgccagtcttgtaaagcaggttgctaatgctactaatgatgtggctggtgatgaatattgagggagggagcatttcaattgtcttgcaggaaccacatgtgctacagtccttacacgagcaatatttactgaaggctgcaaatcaatcgcggctggaatgaatgcacatggacctgaggcggggtataagtatggctgtcgatgctgtggtcacaaatttgaaaagcagagctaggatgattagcacatctgaaga

SEQ ID NO: 7491 - DNA, 96 bp, Glycine max
  Clone ID: 701099956H1
attttacgttataactatcaacttaaaattacacatgaaacatagaaaattacattgtgtaattttaagttgatagttataacttatatttcccaa

SEQ ID NO: 7492 - DNA, 287 bp, Glycine max
  Clone ID: 701099957H1
gcttcctcaaaatttcgccctctttcattcaattctcttctctgctcttctcttctgttcccaccttctgatccatcatccctcgttttctccgaacaatggctgctggtgtcactgtcaagtccgaggttctagaatcttctccccctgaaggagtatgttccaacacggaggaaaaccacctggttcagaccaatttgtctgatgggtcacccaacaagtatgtttctaacaagtctgtgccagcatctggacttaatgcagtgattcctagtgcacatcagctt

SEQ ID NO: 7493 - DNA, 286 bp, Glycine max
  Clone ID: 701099958H1
tgagaaatttgtgttcaaggtagaatatcctacactgagtaattcatacaagattatcttaaaaatcatggacaaggatcttttatctgcagatgactttgttggtcaagccatagtctatgtggaagatttattagccataggggtagaggatggtgcggctgagctacaacctctaaagtacagagtaattcgtgcagatcaatcttattgtggagaaattgatcttggtataacttttaaggtggaagaagagttcaatggagaagctaaacgaggatcgaag

SEQ ID NO: 7494 - DNA, 265 bp, Glycine max
  Clone ID: 701099959H1
gttcggagcactagaaaagaaaaccataattaagatgagaacaagcaaccacttgatcggtcttctgaacttcctaacgttcctgctgtcgattccgatcctaggtggcggaatatggctgagcagcagggccaacaacaccgactgcctcaagttcctgcagtggacgctcatcatcatcggagtcagcatcatggtcgtgtccctcgcggggtttcgcggcgcgtgctaacggaacacctcctcatgcgcctctacctcgtcg

SEQ ID NO: 7495 - DNA, 282 bp, Glycine max
  Clone ID: 701099960H1
cacctcccaactcgccctcgactcacatccttgtccgattccgcgaacgagtcgagttaatcgggttggtaaggtaagatctattctgtttcttcgtcatggcaaccggacaactattctcgcgtactacacaggctttgttttacaactacaagcacattcccatccagcggatgcttgattttgacttcctttgcggcagggaaacaccatcagttgctggaataattaaccctggttctgagggatttcaaaacttttttttgatcaggaggaaattgc

SEQ ID NO: 7496 - DNA, 286 bp, Glycine max
  Clone ID: 701099961H1
cattccataaatctctgtagcccctcctcgattttaccgcaacatgacacaagaaggaaatggcaacaccaacttctgtatgagtgttaacaacaacggctacattagcgctaatgacccgttgaactggggcgcggcggcggaggcgatggccgggagccacctcgacgaggtcaagcgcatggtggaggagtaccggaggccggtcgtgaagctcggcggcgagaccctgacgatctcgcaggtggcggcgatcgcggcgcacgtaccaggggtgacagtggac

SEQ ID NO: 7497 - DNA, 286 bp, Glycine max
  Clone ID: 701099962H1
attttggtgcgtgcaggtcccggtgttagaattggggtttccgtttcgattgtacctaccggccaacttagggtgcagtcactctcgatctcaccgatcaccaacgtgccttcttctcctcaggttcccttagtcaactttcggttttttgattgttgaggatggtgctggttttagccctgggggatttgcacataccccacagggcacctgatcttcctgcaaagttcaaatccatgcttgtccccggcaagatccagcacattatttgtactggaaatttgtg

SEQ ID NO: 7498 - DNA, 233 bp, Glycine max
  unsure at all n locations
  Clone ID: 701099963H1
caatctccttttgtccaagacaaacacaacaatggggaaccaatcctcttcaaacaagatagaaactcttcccatccacacaacatacaacacgacaacaaatatancagtctggncanaaggtggtggatttgntaatggaaccatcaacataggagggctaaaattgtttcaaatttcaacattccacaaagtttggcaaaccttagtaggtggaccaggtgctgcagggg

SEQ ID NO: 7499 - DNA, 122 bp, Glycine max
  Clone ID: 701099964H1
gagaaaggcactgtcctgaagaacctcctacctgccttgttcctgttcctgaaggttataaacgcccaattgagtggcctaagagcagagagaagatatggtattacaatgtttcacacaac

SEQ ID NO: 7500 - DNA, 281 bp, Glycine max
  Clone ID: 701099965H1
cgctgttcctacaatcattccaaatgtgcccttccggtcgcaccctcctcccttcctccgtctccgatttccgaccggcattcgacgtcctcgatgccgaccgcgacggcaaaatcagccgcgacgacctccgcgccttctacgccggagtcggcggcggaggagatgacgtgatcggggcaatgatgacagtggctgacaccaataaggacgggttcgtggagtacgaggagttcgagcgcgtggtctcggcggagagaaagccgtggggtactgtgggg

SEQ ID NO: 7501 - DNA, 281 bp, Glycine max
  Clone ID: 701099967H1
ggttctttccttttctctggtctgcttgctggcatactctatgatatggaggcaactacaacagagggaggaggcaacacatgtgttggaggtcattgttacaggctagtctttattgtcatgactggagcatgcattgttggattcttcttagacattctgttgtcaatcagaaccaagaatatttacaccaagatttccacgagcaagaagcccaagaaatccttaggaacatcaaataggcagtgattcagaatggtatgacattcctgggattgatg

SEQ ID NO: 7502 - DNA, 291 bp, Glycine max
  Clone ID: 701099968H1
ctcgaggttaaacaaggtatttcaattatcgtgtcttcttggctctctgtttagggtacgaacctatccatgtctccttttccttcatactctctttttcccttaattgcttttgtttgaactttatatcataattgtgctcatacgttgacttttcatactttttcatcaagtttgtatacatagtttgtttggttgaaagggaatctccgtttatgttctcgtaataatgaattttgttgtgcaaactatgtctggcttaattatagtgtcagagttgttggattctta

SEQ ID NO: 7503 - DNA, 283 bp, Glycine max
  Clone ID: 701099971H1
agttgatatagacaccagaagacggggaaaacggagaatttagtgttttccttgtgcaggcaaatccattattgtgaattacttgctatctattgctccaaggtccaagtgggatgaagagtttagcagatagggtacccagcttcctagcaagatccgtagtgcactcgcatctcttcctcagattttgacgatgtgcgtatgtcgaacaccaagtgagcatcaagaccagatccgtggcgcactctcaacactttgcggcgaagtcaaaaccgtttggaga

SEQ ID NO: 7504 - DNA, 285 bp, Glycine max
  Clone ID: 701099972H1
ctgcagtaacatggctttttcatggatgatgcaattgtatcaggtgatccattctttttacagatctgaaggtgttagtcctggaagtgaaataccaaagtggttcaataatcagcatgagggaaattgtgtaagcttagacgcatctcatgttatgcatgacgataattggattggcgttgcgttttgtgcaatattcgtcgtacctcatgaaacaatctcagcgatggctttttcaaaaacagatgggtactactcgggttttaatgatattccagtggattt

SEQ ID NO: 7505 - DNA, 275 bp, Glycine max
  Clone ID: 701099973H1
ggcctatcttcacaatgaaccaaatgttataattcatcgagacttaaagccaaggaatgttcttttagtcaattctagtgccgaccatttaaaagttggagattttggattgagtaagcttatcacggtccagagttctcatgatgtatacaagatgactggtgaaactgggagctaccgctacatggctcctgaagttttcaaacatcggagatatgataagaaggttgatgtgtactctttgcaatgattttatatgagatattgaaggtgaa

SEQ ID NO: 7506 - DNA, 279 bp, Glycine max
  Clone ID: 701099974H1
gcgagtgagtgagcgagccaggtagggttttcggtgttcccctctttgtgttcgttcgcgacgatggggtccatccccgatccaggcgagttgagcgagtaggactcagccgagcttcgacgagttccagcgccaaacctctctcatgaccagctgcaccctcctctggaaggagctctccgaccacttctcctccctcgagcaagacctcaaccacaaatccgaagccctcaagcgcaagattcacaccctcgacaactccacctcggactccctccg

SEQ ID NO: 7507 - DNA, 280 bp, Glycine max
  Clone ID: 701099975H1
cggaacgttgctataaacgttgttgttttcagataaacacgtgactcactatctatctatcaatcgatatctccgagttcagccgaaccaaactccgaagctatggcagagctccaaaccaaggttgaacctgttacggtcccggctccggtggatcccgagccaccgctagctgaggctccgccgctcgagaagaaagcggtggcggtgccccacctgttccggctgcggcagaggaaaccaaagctcttgttattgtggagaggagaaggagaatgag

SEQ ID NO: 7508 - DNA, 286 bp, Glycine max
  unsure at all n locations
  Clone ID: 701099976H1
gtccactcctcatcctccctactactacaaatcccctccaccaccaacgtcgcctcagtnnancttaccactatgtgagccctccaccaccttctccatctcctcctccaccataccattacacatcaccacctcctccttccccagctcccgctcccaagtacatttacaattcacctccacctccagtttacatatatgcttccccacctccacctatctacaagtacgtgcgaattgcggaacaccattcacgataaatcatgtactagtttttatcgaggaa

SEQ ID NO: 7509 - DNA, 278 bp, Glycine max
  Clone ID: 701099977H1
atttagaggggaaggcggctatgggaatgggatgaggaagacgagatcgtatggggacatgagtgaatcggtggggagaggggaagagaagagggttgtgagtgtgactccgctgagggatatgacgccagagagggttttcgggaagatgggacatttgcagaagttgttggatcggtttttggcttgtaggcctactgggttggctaagaatagcaggatggttttgattgcgctgtatcctgtggttaaggagagttttaagttgtatgctgata

SEQ ID NO: 7510 - DNA, 279 bp, Glycine max
  Clone ID: 701099978H1
gtttgacaacctctgcaaggtgatcaaggatgttttgggtgacaaggttgagaaggttgtggtctctgaccgcgttgtagattcaccatgctgtcttgtgactggcgaatacggttggaccgcaaacatggaaaggataatgaaggcccaagctctaagggacaacagcatggcagggtacatgtcaagcaagaagaccatggagatcaaccctgagaacccaatcatggaggagctccagaagcgtgctgatgcagacaagaatgacaaatccgtgaa

SEQ ID NO: 7511 - DNA, 284 bp, Glycine max
  Clone ID: 701099979H1
tatcaatactccaatggggaatgccttggggggaaagaaaaccacaaaggtgatgaagattgatggggaaaccttcaagcttaaaaccccaataaaagtttgtgatgtgctaaaagaccaccctggccttgttctgttagaatccgaggctgtgaagcattatggtataagagcaaagcctttggaagcccacaaggaattgatgccgaagaggctttacttcctcgtggaacttcccaaggaagtgacggtggcgccgaggcgggtccggtcggggatcaaca

SEQ ID NO: 7512 - DNA, 278 bp, Glycine max
  Clone ID: 701099980H1
gcaaatatgtattcagagttgcgggaagaggctcgtgatcatgcatgcttacgtaatgcatattttgagcaggcacagcaagcctatcttattggtaataaagccctagcaaaggaactaagtgctaaagggcaactgcacaacatgcatatgaaggttgctcatggacaagctcaagaatccatttacctccagaggtttgttgttctccatgctttgattcctgctctccatgtaagtttggaataaacaagtttatatggcagatgatgttatca

SEQ ID NO: 7513 - DNA, 282 bp, Glycine max
  Clone ID: 701099983H1
gttcaaggttcctgtcagttgtgaacacgaaagctttgaacacagaagctttgaacacggaagctgtgaacactgacagtcctacatttgctgcttctcccaagagtgatgatacgtcaaaaaagccccagactaccaatgaacagggagttggtaatggatctgtttataataaaagtgaagatgggtctgtaaaaagtgctcccaatagtccatttgctagcagtgctattggaagcccgcatggggattttgattctaccataagacagacagctggtg

SEQ ID NO: 7514 - DNA, 269 bp, Glycine max
  Clone ID: 701099985H1
agtttgttgtgagctataagctagtttatcgtgaggagaatatgaagttgtttgttttctttgttgctgcagtagttttggtagcatggccatgccatggcgcaggctaccaaaggttccctctccgaatgaaaactggctatggtgagcgttcttcggaggtaaaatgcgcaagttttaggcttgctgtggaagcacacaacatccgagcctttaaaaccattcctgaagagtgcgttgaaccaacaacggactacattaatggcgaa

SEQ ID NO: 7515 - DNA, 283 bp, Glycine max
  Clone ID: 701099986H1
cttgtttctgtttgagtcgagtcgagtctcttctcttctaatctcctccatagcatattttgacccgatccaaccctcgctttgctagatctcttgatgatgggttccgttctagaggacaagatagaccgtcatagttttcacgaccaccacgacgccgacgatactcccttagcatcttcctcttctaaagtcctccaacaattacacagcttcgattttgaggacacaagcgttgtagatttgcggagctcatccatctttaacacaacacgtatcagca

SEQ ID NO: 7516 - DNA, 265 bp, Glycine max
  Clone ID: 701099987H1
tatacttgaaaccagtgtgtacccaagagagcatgagagcttgaaggagctacgagagttgacggaaaaacacccttggaacctgatggctacaccacctgacgaaggacaacttctaggcatgctccttaagcttatcaatgccaagaacaccatggaaataggcgtcttcactggttactccttgctttccactgcccttgccctcccttctgacggaaagatcttagctatggatgttaaccgggaatattatgaattgggg

SEQ ID NO: 7517 - DNA, 271 bp, Glycine max
  Clone ID: 701099988H1
ctcgagccgtgctgtcaccaccccacgatctaaaagaagaaagaaccagcttaagaaagtttaccaagtaccagttgagaatctctcttcagacatatgggcatggaggaaatatggccagaaacccataaaggggtctccatatccaagggggtactatagatgtagcagctcaaaggggtgtttggcaaggcaacaggttgaaagaacaagatcagacccaacaatgttcatagtgacttacactgctgagcacaaccaccctgaacct

SEQ ID NO: 7518 - DNA, 273 bp, Glycine max
  Clone ID: 701099989H1
tttcaggtcatcacgtgatactcaggcgccgaatcggaaaccagcctatgacaaggcagaacctgggaggataaacccactcattcaccccaccaccagcatcaaagaagccagtctactctggcactggcatggttgactatctcagtggtgatacatacaagacagaaggatctcctgaaaactcagaacccacttcaattgcagctccccttcattctagccctaatccaacctcatcaactattccatctctgtcttcctcacgtcctc

SEQ ID NO: 7519 - DNA, 280 bp, Glycine max
  Clone ID: 701099990H1
ctcaaaccttgagtagagaagtgcttgagggccagagaaagctagtgacgctcgcagctacaagaacaaactctggcacattaaatactctgcctgtccagctaaacaatggtcctttacttcatgaaaaggtcgaggtgcctctagatcccacacaagagctagctccgttgatttctgaacggaaatatgaggaggctttcattggggctctacatagaagtgatgtatccattgtatcttggttatgtactcaggttgatagacacggacttttgtc

SEQ ID NO: 7520 - DNA, 282 bp, Glycine max
  Clone ID: 701099991H1
ctcaaaccttgagtagagaagtgcttgagggccagagatagctagtgacgctcgcagctacaagaacaaactctggcacattaaatactctgcctgtccagctaaacaatggtcctttacttcatgaaaaggtcgaggtgcctctagatcccacacaagagctagctacgttgatttctgaacggaaatatgaggaggctttcattggagctctacatagaagtgatgtatccattgtatcttggttatgtactcaggttgatatacacggacttttgtcaa

SEQ ID NO: 7521 - DNA, 281 bp, Glycine max
  Clone ID: 701099992H1
cttatgcaactatagtgaggctaagagattggtccataattaatcaaaatgttggctatattccacaaagcttttgctcatccacctgaagagctcaacagccctgcatcttacaaaggttccaagaagcctaaggttcccgaggaaactctcaaagatttcctttcccaccatcctcacaacacttgctctatgagctttggtgatgctgctgttctagcttatgtccgtcctgatcaatctttctctcgtcatcaaaggctattttgtgggatcgatga

SEQ ID NO: 7522 - DNA, 280 bp, Glycine max
  Clone ID: 701099993H1
agagaacctcttttcctttacatttacctttcattcatacaagctcataagtcaattttggtttatcattcctagaagaaggaacctttaaccattgacatggccatggcatatgttgctagatcatcggagtcatctcaagtgcttaatttccattccactgctaaatggaatgctcactttgatgccttgaaacaaactaacaaactgatggtggttgatttcactgcttcatggtgtggaccttgcaaactcatggaccacattatccaagagtttg

SEQ ID NO: 7523 - DNA, 283 bp, Glycine max
  Clone ID: 701099994H1
gatgcccccggggcaaaggagtatgtgcacatacgaattcagcagaggaatggaaagaagagtctgacaacagtgcaagggctgaagaaggagttcagctacgagaagatcctcaaggacctcaagaaggacttctgctgcaacgggactgtggtgcaggacaaggagcttggcaagattatccaactccaaggcgaccagcgcaagaacgtatcccatttcctcgttcaggccggtcttgtccggaaggaccaggtcaagatacatggtttttgatttaacg

SEQ ID NO: 7524 - DNA, 272 bp, Glycine max
  Clone ID: 701099995H1
aacaagaattcatctattcatttcagcccatcagcatggcgaaggagaagaaaaacttgtccaacaagaacaagaagccaagcaatgtccacgaggttcacttccgcggagtccggaagcgcccctggggccgctatgccgccgagatccgcgaccctggaaagaagacccgcgtctggctcggcaccttcgacaccgccgaggatgccgcccgcgcctacgacgtacgcgcccgaaattccgtggccccaagccaaaccaaatccccttct

SEQ ID NO: 7525 - DNA, 285 bp, Glycine max
  Clone ID: 701099996H1
ctcgagccgttcgtctcggcttgtctttcactttctcaaccacccaacacaacacaaattccctttcttcttcttcttcttcttctaaatagatagaaggaatttagattaattaacacaacctttcattcattctgttgtgttgggaaatatgatgttcgactttgccaggctttggacccgaaacacgttaataggtctcggcttgggtccatttctttctcttctcatcacttccaccggcttcacttcctctgaattggctaaacaaggtattaatgctcc

SEQ ID NO: 7526 - DNA, 153 bp, Glycine max
  Clone ID: 701100001H2
ctgagccatatcatatcagatcctgcttcttcttcctttccctttttctcactcccactcttcaaacttgcctcactctcaccaacacccaacaaacaaagttacttcattgcaaactctatattagtctttactctatttgtttattccaca

SEQ ID NO: 7527 - DNA, 284 bp, Glycine max
  Clone ID: 701100002H2
gctcgatctcaacctgcaactcctaatccaacaaacttttttttatttagaaaccaaccaagttgtgttatttctatttggtttggctatatctctatggcactagtcaaagacctatgctaaccttttcttctccctctaaatacaaattctgagattcatattcatccgtctgtgtacaaaatggcaggataggaagactgcttcttggtttctaatttcacagtggactttgctgcccggagattctgccagctaaagacaaataaagatataggtgctat

SEQ ID NO: 7528 - DNA, 272 bp, Glycine max
  Clone ID: 701100003H2
gctgttcctacaatcattccaaatgtgcccttccggtcgcaccctcctcccttcctccgtctccgatttccgaccggcattcgacgtcctcgatgccgaccgcgacggcaaaatcagccgcgacgacctccgcgccttctacgccggagtcggcggcggaggagatgacgtgatcggggcaatgatgacagtggctgacaccaataaggacgggttcgtggagtacgaggagttcgagcgcgtggtctcggcggagagaaagcccgtggggt

SEQ ID NO: 7529 - DNA, 269 bp, Glycine max
  Clone ID: 701100004H2
gaagtattgctcagcatggagttgaattgctatatgcaactttgacaaagatatttagttcactgcaagaagcatataaaggtcaaattgttggaattatctactgtcacgtggccactatccaagagtcgggcaagaagtttgatgtgatatttactcctcaccatccgtatgctcgatggttggcagaaacaaatgcagtgaatgcaacattgccagaagtggtgctggttaggagaacccttgcttggataacaggaattatattg

SEQ ID NO: 7530 - DNA, 265 bp, Glycine max
  Clone ID: 701100005H2
gaagaattaaaggaagcctaactggtgtaactattgggactgtgacagaatcccaaaaaatttggagaactttccaagcgcttggaaacatagcctttgcttactcctactcaatgatccttattgaaattcagaaaacaacacaaacaacaaattgaagtctaaattaaaatggtggttgttatggaacaggacacaatcaaatcccctccagcagagtcagagacaatgtccaaggctactttaataagtgttttggtcacaa

SEQ ID NO: 7531 - DNA, 263 bp, Glycine max
  Clone ID: 701100006H2
actcgagcgaatcggctcgagttggaagtgatctaagttgactgaaagtgagagcactgtcgttcgcagtggcaacctgttcaacgtcgtcgttcttcccttcaggtttcgcaattcgcaatccaaagcagcttcaacctttcgtttcaatgtcactgtcttcgaagctaccgttgcatttctccggcaatgccagattcaaccgcaaccacccaaccatgttcaaaattcgagcctcaaattcaaactcttcatcttcatcc

SEQ ID NO: 7532 - DNA, 262 bp, Glycine max
  Clone ID: 701100007H2
ctgggaatcaattgttttgacggtagttgccactgccggcaacaacatcggcaaaatccttcagaagaagggcactgtcattcttccccctctctctttcaagctcaaggacataagggcatatgctttgaacaaaacctggctcataggttttgtaatggatatatttggggcactgttgatgttaagggcattagctcttgctcctgtctccgtcatccaaccagtttctggctgtggattggcattctctcagtctttt

SEQ ID NO: 7533 - DNA, 263 bp, Glycine max
  Clone ID: 701100008H2
ctttcttcctttgtaatagaaagcacgcgtttctctctctccctctctcaacgaatatttgtgtacttcctcttttgtgggtagattcaatttaccatgtcgagttcatcggaatactctcaattttccggccagaaaccggcgaggtcgccggagaaatcgagcttctctcagacttgtagcctgttgagtcaatacatcaaggagaagggtagcttcggagatcttaccctcggaatgacatcatgtgggtcacctgagac

SEQ ID NO: 7534 - DNA, 267 bp, Glycine max
  Clone ID: 701100009H2
caaatccgcagcaactattgagggattggcagcgcagcttcgccaagagtcgtcgcaacattgagcgccaaattcgcgatatacagagagaagaaaaaaatgtgcagaaggctattagagaagctgcaaagaggaatgacatgggctctgcaaaggcacttgccaaggaacttgtgagatctaggcaaactgtgaaccgcctttatgaaaacaaagcacaaatgaattcaatatcaatgcaccttggagagagtgttgcaattgctc

SEQ ID NO: 7535 - DNA, 264 bp, Glycine max
  Clone ID: 701100010H2
cttcgttgtccagtgggttatctaatggcggaagtgtctcacgagactttgacttaaataatggaccaggccttgatgaagttgggagtgaagtcccaacacgtagtcagccaatgaaaagtactgtaccatttccaactgctgttcatggcacgagagcaaacaatgctgaatttgggaattattctgcatggtttcctcctggcaatacttattctgcaattactgtcccaccacttctgtccggcagaggggagcagagtt

SEQ ID NO: 7536 - DNA, 264 bp, Glycine max
  Clone ID: 701100011H2
agaggaggatgatgatgacgacgagtgaagatggtgatacaagatgaagcgtaggaggatgtgggaaaagaaaattgttttgcatagtagttgttgggtttagaatttcataggatggttcccaacccacatccctttatgataattagtttctgaatttttattttgtcctcccttactagggttagattagcgcacaatcgtaattagggttcagtatcatgatcatgtacttaaaagtcaatgctatgatacgtttcaatt

SEQ ID NO: 7537 - DNA, 138 bp, Glycine max
  Clone ID: 701100012H2
cggtggcaataagtccaatgaagttgctgttggtgttccgatatggtggaactaccccaacattatttagagattaattttttaaatttacattatttattttttataacggtcaagcatcatagaagaagttcagtt

SEQ ID NO: 7538 - DNA, 278 bp, Glycine max
  Clone ID: 701100015H2
cgtaggttgggaattcggctcgagcacgaatatcttgttgtttggagcgatccgagaaaaactctgtaaacatgttggtttaccaggacctccttacaggtgatgagcttctctctgactccttccgttacaaggaaattgagaatggaatgctgtgggaagttgaggggaagtgggttgttaaaggagcagttgatgtagacattggtgcaaacccttctgctgagggtggaggagaagatgagggagttgatgatgcagctgttaaggttgttgac

SEQ ID NO: 7539 - DNA, 266 bp, Glycine max
  Clone ID: 701100016H2
accgctgaagctcgctcttcctggacggagcaaccgagaccttcctatctgaactcctcttgctcttcgctttacgatatcctcggcatccccgctggcgcctctaaccaagaaatcaaggccgcgtaccggcgactagccagagtctgccaccccgacgtggcggccatcgaccggaaaaattcgtccgctgacgaattcatgaagatccacgccgcgtactctactctttctgatcccgacaagcgcgctaactacgatcggag

SEQ ID NO: 7540 - DNA, 277 bp, Glycine max
  Clone ID: 701100017H2
tcggaacccagttatcatggaagacacacagcagtaactgctcctcggactataaattttcaacctattgctgtcccttccatcacagtagatgaattgaagtctttgacagataattttggctcaaaatatttcattggtgagggtgcatatgggaaagtatatcaagccacattgaaaaatgggcatgcagtagtaataaaacagttagattccagtaatcagccagagcaggaatttctttctcaggtctccatcgtatcaaggctaaagcatg

SEQ ID NO: 7541 - DNA, 260 bp, Glycine max
  Clone ID: 701100018H2
ataatagcacgcactcttttcattctttctctgttctcatttcatcttctacacgcgtttctaatcattattagactcgatctcaacgatgaaggcaacactgctttgtccttgttcttctgctcctctgattctcgacacgcatagcaaccgaacctcggcaacgagacacgcttccaccgttgtttgttgttcgtcgaggaatcaaccctacatcccgaagctcgagccttttagccgaaccaaatttgaaagggccg

SEQ ID NO: 7542 - DNA, 269 bp, Glycine max
  Clone ID: 701100019H2
caatatcacacataatataattccaaaatcactcctattgctatagcaatatgatgggtgacactgagatcaaaccatcagttgaagtagtcatatgtgcttccatgaacaataacaatcgcgcaaacaaccacaccctcccaaccgacatcaccaactcatcacaatcacacttaccaatcttgaccaagctccatgctggttactttttcatatgcctttcctttggtgcacaagctttgctctggaagagtttgagtaaacacaac

SEQ ID NO: 7543 - DNA, 266 bp, Glycine max
  Clone ID: 701100020H2
acccaccgcggcggcggctgggcctcctccgacgagatcacgaccgtctggctcggcgacctccaccattggatacccgagaactacctccacaactgctttgctcacaccggcgaggttgtgtcggccaaggtcattcgaaataagcaaactggtcagtctgagggatatggattcgtggagttctattcacgagcgacggctgagaaagtcttgcagaactataatggcacgatgatgcccaatacagatcaggcattccgtct

SEQ ID NO: 7544 - DNA, 267 bp, Glycine max
  Clone ID: 701100021H2
ctcggatcccgactcgttcttcgagcccgagtcaccaactcatggcgcgggaactcactcaccacctttcactaatcctattcctcatcgccaccgtcgctggcgacaccgcgctcctccgcaaccgccaccacggttctcgcccttccatgctccttcccctgtacctctccgcaccgaattcctccacgtcagcgctcgatccccgtcgccagctcaccggatccgagtccaaacgccaccctaacgcacgcatgagactccacg

SEQ ID NO: 7545 - DNA, 264 bp, Glycine max
  Clone ID: 701100022H2
tgttttccttatcattgtgtctctatgacagaacagaactctcttgggtgttggtgttggtgagggatctgaggcaaaggtgttgatgatatgggagcgtgtgtttcaactccacaagggtgcgtgggagggaggttgagctcttccaagaagaaaaccagaaagagaaggagagagggactcagaagaagagttacttctcggttgtgtaaggaatcatcggagaaagttgatgtggcagggttgcctgattgttcctttgct

SEQ ID NO: 7546 - DNA, 263 bp, Glycine max
  Clone ID: 701100023H2
atggaatgaaaagtttgattcttcgataacaaaagactatgattttcaccttcttgatggccgttcaatcagggttcccttcatgacgagcaggaagaatcagtttattagggcttttgatggtttcaaagtccttggtcttccctacaagcaaggtgaagataagcgccaattcaccatgtactttttccttccagaaacaaaagatgggctgttagctttggctgagaagttggcttctgaatctgggttcttggaacgca

SEQ ID NO: 7547 - DNA, 258 bp, Glycine max
  Clone ID: 701100024H2
cggctcgaggagaaaagttagggttcacaacttttccttttccttttgcttgcgaatctgaatcaaataatcaatcatccattcattattcatcatgtcgaccggcgaagaaaatcacgctgaagagttcggacggcgaggctttcgaggtggaggaggcggtggcgctggagtcgcagacgataaagcacatgatcgaggacgactgcgccgacagcggcatccctctgccgaacgtgacgagcaagatcctggcga

SEQ ID NO: 7548 - DNA, 262 bp, Glycine max
  Clone ID: 701100025H2
cgataactatgatttgacaactgatgaagtagggatagaatctaagcaaagaataaccacagactgtgggggaataattgagtcagttgataagccaacaacatctgaagtaggtttagaatcaacccccttttctagtgatattggtcagcaaaatcccaatttactagatcttggcgatgcctataagctagctgtcagtaacagcagaggaagacctggcatgcttgtagagcattggcttggaaaggattctacaaga

SEQ ID NO: 7549 - DNA, 260 bp, Glycine max
  Clone ID: 701100026H2
aaaagacttctgcatacccgttgatggaggaatggatgtattagcatttgaagatttcttgcttgaggagaaacgtaaagaattagaagaacttgcttgggcacaacctgaaagggaaagacaagctgaagatcaaaggcgagtggaggcagacagagctgcaaaggaagaggacagggcacgggcgaaggcggaggttggaagaatgcgagacacattgccacaattgttgaaaaatgctgtaaagtccattgataatg

SEQ ID NO: 7550 - DNA, 260 bp, Glycine max
  Clone ID: 701100027H2
agagggagtcagagaaaccctaggtaagaagaaaagatgccggctggtcatggtttgagatcccgcaccagagattccttctctcgtcctttcaggaagaagggaaccatcgccctcaccacatacctgagaacctaccacgtcggcgactaggttgacgtcaaggttaacggtgccgttcacaagggaatgccccacaaattctaccatggccgcaccggacgcgtctggaatgtcaccaaacgtgctgttggcgtcga

SEQ ID NO: 7551 - DNA, 140 bp, Glycine max
  Clone ID: 701100028H2
atcgagcgaatcggctcagggctcgagggtccttccctactaccagggtggtgtaccttgatgtatgtcacttacgaagtggcacgtgactagacaatgagcttattgggaattttgtggttggagaataagagtttatg

SEQ ID NO: 7552 - DNA, 262 bp, Glycine max
  Clone ID: 701100030H2
acccagcgaatcggctcgaggccctcccaacctctatacttcacaaaacccaaaaacaccagaaataccataaaatttttcagcttctccgccgccgtacagccaccacctccgttcggatctccggcggacctactatccctactactctatttacacggaagaacaaaaaaactatcccacaaaacaaaaattccaaaagcggttcggttagggtttagttttttttttatattctttcgtgtatctaatttttcatcag

SEQ ID NO: 7553 - DNA, 141 bp, Glycine max
  Clone ID: 701100031H2
aatgctggtaatgctgccggaaagagaaataccagaaccttggcgcatcatattgtttattccctcacttggatcgttaattccgcgaacgagcttctgccgttcaaattaaccatggagaatattggtgaggagtacggc

SEQ ID NO: 7554 - DNA, 139 bp, Glycine max
  Clone ID: 701100032H2
cataacctaacctaacccttgcgacttgcgacttgcgagtgagagtgaggttgggtttggaaggcaagggcttgtgttgtcacaatccaagagagaagtaatggcgaacatagacatcgaaggcatcttgaagcagcag

SEQ ID NO: 7555 - DNA, 149 bp, Glycine max
  Clone ID: 701100033H2
gttagaaacaaacttagcctcgtggcagttcggggcattattaatgcactatccattctcttcacatcccatttaacgcttggttgcacaaacctcacctcaattccaaaaccaccacccctattggtcatgtaaaacacaccacaaca

SEQ ID NO: 7556 - DNA, 267 bp, Glycine max
  Clone ID: 701100034H2
ctactcactcactcatcagagctatatattaattttcttctaccaaaaaaacgcaaatcaggtgacgttgcactactctgctcactcgctccattgtctatcgattccttcaaatcaggtttttgcattgtgatcatgacattcgttgctgcacactgttctggtcatcaccacagggaattggaaaggagcattggtgtcatcccttgaagaatttgagtcaagaagcaaggggccaacaaccttaagagatattggactaagaag

SEQ ID NO: 7557 - DNA, 263 bp, Glycine max
  Clone ID: 701100035H2
gttctacagtcaagttgttcaaacacatggctcagcaaagaatttgcctatatcctgcacttcaagactcagttcagggctgtgctttttctctcaaaatgtcgtgtcccaaatcagtaccccaatcttctttgtaaatgcagcctatgactcatggcagatcaaaaacattttggcaccaggtgctgctgatccccgtggccaatggcgtgaatgcaagcttgatatcaaaaactgctcacctaatcaactcagtgtaatgc

SEQ ID NO: 7558 - DNA, 263 bp, Glycine max
  Clone ID: 701100037H2
ctcgaccgctcgagccgtcgtgaagttggactcacatttcacctcctcaaggatgaccccgggaacctctcaaagaacattgataaggcactttttgaggctttcaacccattgaacatctctgattacaactccatcttttggattgcacaccctggtgggcctgcgattttagaccaagttgagcaaaagttgggtctcaaacctgagaagatgaaggccactagagatgtgcttagtgaatatgggaacatgtcaagtgc

SEQ ID NO: 7559 - DNA, 260 bp, Glycine max
  Clone ID: 701100039H2
tccagagccagcattacgccggggtgattctgtttatcttgtggggttgagtagaagcctacaagcaacttctagaaaatcagttgttaccaatccttgtgctgcattaaatataggatctgctgattcccctcgctatagagcaaccaatatggaagtaattgagcttgatacagattttggcagtacattttcgggtgtgctaacagacgaacaaggaagggtccaagctatatggggaagcttctcaactcagctga

SEQ ID NO: 7560 - DNA, 258 bp, Glycine max
  Clone ID: 701100040H2
gtccaacctacccctttttcttctcccaccaacttcaccgtcttcttcctcgatcatgtctcacttcaagggcaagtaccatgatgagcttattgccaatgctgcttacattggcactcctggaaagggtattcttgctgctgatgagtcaacagggacaattggcaagcgtttggccagcatcagtgtagagaatgttgaatccaacaggcgtgctcttagggagctgcttttcaccgctcccggtgctcttaaata

SEQ ID NO: 7561 - DNA, 263 bp, Glycine max
  Clone ID: 701100041H2
ccaatatattccattctctctgtgtatttccctacctctcccttcaagatcttcgtcaagaccctcaccggcaagaccatcacccttgaggtggaaagctctgacaccatcgacaacgtcaaggccaagatccaggacaaggaaggaatccccccggaccagcaacgtctcattttcgccggaaagcaacttgaggacggccgtacccttgctgactacaacattcagaaggagagtactcttcacctcgtcctccgtctccg

SEQ ID NO: 7562 - DNA, 261 bp, Glycine max
  Clone ID: 701100043H2
aaatcttggagcactgcattctttggtagctggaggcacagctcatcagacagtgttgttgccacaaacaaagagggttcaaatgacactaaaaaatcaggaaaagtaggttctcaaagtagtggaaatgatcactcttcttccaataaaagatcgtccaatgaaattttccctgaaccattggaaatacaagatgtggagacaggagtgacaagataaccacttgtgaaatgggtttggttattctttagtctgtgagat

SEQ ID NO: 7563 - DNA, 259 bp, Glycine max
  Clone ID: 701100044H2
ccacgatatggtcttgaagtaggacttactagttatgcagcagcttattgcactggtctcctgttggcccgaagagtcctcaaaacacttgaaatggatgaggagtatgaaggaaatgttgaggctactggagaggattattcagtggaacctgccgagagcaggaggccattccgtgcactccttgatgttggtcttgttaggactacaacaggaaatcgcgtctttggtgcccttaagggagctctggatgggggtt

SEQ ID NO: 7564 - DNA, 261 bp, Glycine max
  Clone ID: 701100045H2
cgcaatggcccaaatgacactgttttcttattctcaaccccaaagtagcaataaatagatgtctccaatttttctgctcttgatcaaaagtcgtagaactagaaggttaggttgagggcgatatgaaggtaaccaaagggaaggaaactaaaattgttctgacaaaacccttccaattggaaggtgaatcagatttagaaccgtcttatagagctcccaatctcctacatcgcttgttaagtttactcaagaacgtgcggc

SEQ ID NO: 7565 - DNA, 251 bp, Glycine max
  Clone ID: 701100046H2
attttgcaaaccaggcgctacttgcttatggtttatctagctcgaggcgtgcaccagatgctattcatccctatggctattccaaggaaagatttgtctcgtccttgatatctggtgttgggatcttttgtcttggttctggtgccaccgttgttaatggagtacagaacttgtggattgcacagccccctgagaatatgcagtatgcagctttggtgatatgcggttcattcatcattgaaggtgcttct

SEQ ID NO: 7566 - DNA, 262 bp, Glycine max
  Clone ID: 701100047H2
ctctaagcatccatggccatggcgtctgcaaagctcaacaccttgtcttcccagtggatcgcccacaattccttctctcctcgccgtggatcttcttctcgctgagttctgtcttccgatccgcgcttcttcttaccaacacgaactcgtccaaaccgccagatctattgcatctcccggtcgtggaattcttgcaattgatgaatcaaatgccacatgtgggaagcgtttagcatccattggattggacaatactgaggtg

SEQ ID NO: 7567 - DNA, 257 bp, Glycine max
  Clone ID: 701100048H2
ctctctcttcctctttagcttcatcgccatggcatcaccagcaagaaccttctttgccttcattctcgccgtcgtcgctctcttcttcgccgccgccaatgctcaagacctctccccggctccgagtcccgatgccggagcggcgggatccgtttcgagctccgtcgccatgatcggagcttcggttgtgctgtcattgatggctatcttgaagcattgaaatccgttaatttcgttgggtttgtacaaaattgatt

SEQ ID NO: 7568 - DNA, 266 bp, Glycine max
  Clone ID: 701100050H2
ctgagatcgacctcgcatcatgtttatggaatggctgctatcttatctcggaaatcactccttgctcttcgttcgcgccaattgtgaagaaaatttgtcttacataaatgccttctgtagatctgcatacccattcaattgatcaactgggttactaatcaaaattgcatagacagaaagatcagcagaccaaatgtttccactcccatatctcttccaagatttccatggattcctaaacgacttgcaggattgggaattttcta

SEQ ID NO: 7569 - DNA, 264 bp, Glycine max
  Clone ID: 701100051H2
ttgtgctgccggtaacttgaaccaagactttcagcttacgtggggagatggtcgtgctaaaatactcaacaacgaaaatcttctcactctctcccttgacaaggcctctggctctggcttccaatccaaaaacgaatacttatatggcaagattgacatgcagctcaagctcgttcctggaaactctgctggcactgtcaccgcctattatctgtcttcaaaaggatcaacatgggatgagattgacttcgagttcttggggaa

SEQ ID NO: 7570 - DNA, 262 bp, Glycine max
  Clone ID: 701100052H2
cccgagcgaatcggctcaggattgcttccctccttccctacttcatctatgcttcactccaaatgcgtttcttcacctatgtctcacttaatgattcagtggatgagaaacgacaggcaaacaagtgatccagaatactgtaatgtggtaaggcagcgatcgattagacacacaacagttggattcacagctcgtttggaagcatccaaacgttttgaagcatccagaagagttgaagcattcaatccttttgaagcttcca

SEQ ID NO: 7571 - DNA, 82 bp, Glycine max
  Clone ID: 701100053H2
cgtaatctgagtgtttgaagcaaatccatcgacatggcagcatcgtcttcttctgcttcagaggagccacaactcaaggacg

SEQ ID NO: 7572 - DNA, 256 bp, Glycine max
  Clone ID: 701100055H2
cttcatttgcatttccatttttcacactctctctgcttccaccatgtggacacttcgtcgagcttctcttcgtctcagtacgagccaaggacttaacgcgggagctacccgtgcttcggctgtcaaattagtgccaatcactgttgaagaaaatgaggctggtatccctcagtctcgtcaaatcactcacagtagatttctgtccgctgacacattttgccgcacgggtcgggtgtccctgaaatttgctgtgggc

SEQ ID NO: 7573 - DNA, 259 bp, Glycine max
  Clone ID: 701100056H2
gatatttctatagttaaagagctgcctaaagagttcagctggagcacaagagagtactatggcttggctattcgagaaacccgaatcaaggctgcgcctgtgcatgcatcagcccattggtatctggagaatgttttgcctgttctacagagttatggtattgctgcaatctctccattttctcacagactgagttttgacaacttgcctatggatattcaacacctacgctgtaaagtcaacttccaagctttaacct

SEQ ID NO: 7574 - DNA, 258 bp, Glycine max
  Clone ID: 701100057H2
gtgctctgctcgtgcctctagggttatcatatctccatttccatttcctctctctcagtttccaagactcttaagctatgggaaagtcttacccaaccgtgagcgctgattaccagaaggccgttgagaaggcgaagaagaagctcagaggcttcatcgctgagaagagatgcgctcctctaatgctccgtttggcatggcactctgctggaacttacgacgtgagctcgaagaccggtggtcccttcggaaccataa

SEQ ID NO: 7575 - DNA, 258 bp, Glycine max
  Clone ID: 701100059H2
gtgatttggagtttggagcgactgaactaatcattaatttgcactcgctgtttcagcttcatcacccttcttttgcatcatttatatctcttgagaaatggcacaagaaacctttctattcacatctgaatctgtaaacgacggtcaccccgacaagctgtgcgaccagatctctgatgcagtacttgatgcgtgccttgatcaggaccctgatcactaggtagcctgtgagacatgcaccaagaccaacatggtcat

SEQ ID NO: 7576 - DNA, 258 bp, Glycine max
  Clone ID: 701100060H2
aatccctctttcttcctcttcctcagtagtgcgattttcgattctcttctctgcaactatgcctaaccctaaggtcttcttcgacatgaccatcggcggtcaacctgccggccgcatcgtgatggagctctacgccgacgtgactccgagcaccgccgagaacttccgcgcgctctgcaccggcgagaagggcgccgggcggagcggcaagcccctccactacaaaggctcgtccttccaccgcgtgatcccgaactt

SEQ ID NO: 7577 - DNA, 139 bp, Glycine max
  Clone ID: 701100061H2
atacggtccaaaaccaaatattgaacgactcgtcgtaaagaagcacacctttccctttcccttcatttcatcgtattcgtgttcgcagtgtctaaactaacccaatgctctctcgctctctcacagctcgtcacatact

SEQ ID NO: 7578 - DNA, 139 bp, Glycine max
  Clone ID: 701100064H2
cagaagatgaagaattgggttcaggctgttaaggttgttgttggagtccttctcagtggtgagaagaggctctgtgatggtttgtttggcgatttggatgatttgaaggagatttgtttcaatgagacttctaagggct

SEQ ID NO: 7579 - DNA, 138 bp, Glycine max
  Clone ID: 701100065H2
aaacacaaagacattcattcttgtaccaatgcgaacagaagaagcacccatccacggcgatatcttagaggccatattctcgcacgtgccactcatccaccttgtgcccgcctctcacgtgtcgaattcctggaagcg

SEQ ID NO: 7580 - DNA, 265 bp, Glycine max
  Clone ID: 701100066H2
aaacgacattcattcatctatggctacccttattgctcccaccagtcactctccccaagaagacgctgaggctctcagaaaggcttttgaaggatgggggactgatgataaaactgtcatagtaatattgggtcatagaactgtttatcagaggcagcagatcagaagagtctatgaggaaattttccaggaggatcttgtgaaacgcctagagtctgagatcaaaggagactttgagaaagccgtgtaccgatggatactagaa

SEQ ID NO: 7581 - DNA, 264 bp, Glycine max
  Clone ID: 701100067H2
cacactttctctctctttccttcaaatctcaattctattttgcaaaatctgaatcaaacacagttaaagacgcacaagaaaacatctcgctcaacaccaccaacacttcggatctacgtttccactctccgaacatcaaaaaaggaaagaaaaaccgatttacagcgacaacaacgaacgaacgatttctcgaagcgctctcaaaatggcgcgtgcaccctttacttcattccccttcgtcctcattacccttctctcaattct

SEQ ID NO: 7582 - DNA, 260 bp, Glycine max
  Clone ID: 701100069H2
attggctttcctcttctacaattctaaaatcacgcaaatggcatccaagagaatactgaaggagctcaaggacttacagagagatccaccaacttcatgcagtgcaggacctgtgggtgaggacatgttccattggcaagcaaccatcattggtccaaatgacagtccctatgctggtggtgttttccttgtgaccatccatttccctccccgttatcccttcaaacctcccaaggttgcattcaggaccaaggttttcc

SEQ ID NO: 7583 - DNA, 259 bp, Glycine max
  Clone ID: 701100070H2
cgagccatttgggagttaggttctgcacgctctgcttccagcgagtgttctttcttcgtttcaacaccttaatttgcacacgctgcttcttcagcttgagaaatggcacaagaaacctttctattcacatctgaatctgtaaacgagggtcaccccgacaagctgtgcgaccagatctctgatgcagtgctcgatgcgtgccttgaacaggaccctgacagcaaggttgcctgtgagacatgcaccaagaccaacatgg

SEQ ID NO: 7584 - DNA, 256 bp, Glycine max
  Clone ID: 701100071H2
cagaatggcagcacttggtggcaatcgtgatgtggcaggaagccagaacagccttgagatcgatggtttagctcgctttgctgttgaagaacacaacaaaaaacagaatgcccttttggagtttgaaaaggtagtaagtgcaaaacagcaagtggtttctggtaccttgtacaccatcactttggaggcaaaagatggtgggcaaaagaaggtttatgaagccaaagtttgggagaaggcatggttgaacttcaag

SEQ ID NO: 7585 - DNA, 257 bp, Glycine max
  Clone ID: 701100073H2
cacgagtttctctatctgctttcttcacaaagagtaacctcatcttctaaaaactttctcaaaaccattattattctctaatacttcgtttcttcaattaattaattggtttcttgctatggctgtggactctgcgatttcgtccccattgggtcccccggcctgtgagaaggacgcaaaggcgttgccgttcatcgaagaaatgactcgcaacgccgacgccgtccaggagagagtcctggaggagattctcacac

SEQ ID NO: 7586 - DNA, 255 bp, Glycine max
  Clone ID: 701100076H2
gttctgggggtggcgtcgccggcgattcccccctccggttccctctccacccttcaattcaaccctctcgtcttcgcttcactgattccctctttcaaaatgcttccgatcgcttgctagggttttccctctcccaaatctcctcctcggaaagcaccctgtaccttttattcctccgactaatcaacttctttgctatggctattcgtgtaacttttccttttcgggctatgtcgcccagagcctcgcctcctc

SEQ ID NO: 7587 - DNA, 252 bp, Glycine max
  Clone ID: 701100077H2
ctgagccttttgctcaaggagcttttgggaaactctacagaggtacttacaatggtgacgatgtgctattagaatcttggagaggcctgaaaatgatccagcaaaggctcaattgatggagcaacagttccagcaggaggtcatgatgttggccacactaaagcatcctaacatagttcgtttcattggtgcgtgccgcaagccagtggtatggtgcattgtaactgagtatgccataggtggttcggttcg

SEQ ID NO: 7588 - DNA, 259 bp, Glycine max
  Clone ID: 701100079H2
caaaaatagaaagaaagagaaataccaaaaccttggcgcatcatattctttattccctcacttggatcgttaattccgcgaacgagcttctgcccttcaaattaaccatggagaatattggtgaggagtacggctactggccggagaacgacatgcttttccaaaacgaagaccttggcagctgggcgataatggatgaggcagcgttatcagggtcagggtactatgattcaagctccccggacggtactggtgcttc

SEQ ID NO: 7589 - DNA, 245 bp, Glycine max
  Clone ID: 701100080H2
gtgaacttctttaagcatgcctctgcactggaagagttttgtggaggcacctacaatgaagaaccagaaaaatactctgctatatcattaccagcaaagttatgtcgattgggtttaacatatcttggaaagaatgagttgcccatagtgttcatgtttgcagccgtactaaaaaaattggatctctctatgcaatgctagacacggaggatcattgcatgttaatccaaaagtgtccaatctgg

SEQ ID NO: 7590 - DNA, 268 bp, Glycine max
  Clone ID: 701100081H2
aaatacttctcttggcattttgtgtcccttctctctttctcttgctcgatattttccaaccaaaatagattattaaaaccaaacgtagctaggcaccactgctaggaatggcaagtgagatatttcttgcccttctgatcacaacctttgtggttgcagcctctgctggtcaacttcaaccaagactttgagataacatggggtgatggtcgtgccaaaatcctcaatagtggggaacttctcaccttgtccctagacaagacctctg

SEQ ID NO: 7591 - DNA, 261 bp, Glycine max
  Clone ID: 701100082H2
gttcaaatgtccaaggatggaatacccttttgcttaagctctatagatctatcagagagcacaacagttgctgatacacaattgaaaaaccgtgcaacgactattcccgagattaaatatcgcagtggcatatatacattcagcttgacatgggatgagataaaaacattgactccctcaatattgaacccttatgagaaatacatattgtcccggaatccaaaatccaaaaatctaggaaaacttataaccttgtctgac

SEQ ID NO: 7592 - DNA, 259 bp, Glycine max
  Clone ID: 701100083H2
gctactggaaatggtttgctggcaacttggcctctggtggtgctgctggtgcatcatcccttttgtttgtttactctcttgactatgcccgtacccgtcttgccaatgatgcaaaggctgcaaaaaagggtggagagagacaattcaatggtctcgttgatgtctacaggaagacattggcatctgatggtgttgccgggctctaccgtggtttcaacatctcatgtgttggaatcatcgtgtatcgtggtctgtactt

SEQ ID NO: 7593 - DNA, 258 bp, Glycine max
  Clone ID: 701100084H2
tttcacttaggggaagaagagaggatcaagcttcgtagaggaagggttttttcccttcagaatgaacctgatgtggctcgagtttggctgcctaactctgatttccctggtcttgctatggctcgggcatttggagatttttgccttaaggcactttggattgattgctgttccagatatctcatatcaccgccttaccgagaaggatgaatttgctgtgttagcaacagatgggatttgggatgttctgtcaaatga

SEQ ID NO: 7594 - DNA, 252 bp, Glycine max
  Clone ID: 701100085H2
cgcctccattatcagtcctttttcaggcgtggtttttacctaaccctacaattcgccgatccttccagttggggtttttcgctttcagcgaagagcggtgtatatagaaaccctattccccctatgcaccaggggaattgaatatagaaataagaaaaaggcaaaaaaaaaagaggttgaaaaagttgtatgttaaataggtaattctgttgtttcacgtgtttctggactcaggagctgagctgtttccag

SEQ ID NO: 7595 - DNA, 135 bp, Glycine max
  Clone ID: 701100087H2
ataggattgaaaatcttgcaaatctctcattttgtgtggtagatcttacggcatcaaatccctggttgctttcgcagatcgctcccttttgcaactccaactcccttctcttgatgtccaccatcagaataggtg

SEQ ID NO: 7596 - DNA, 250 bp, Glycine max
  Clone ID: 701100089H2
tgaaaagcaacaactaccaccaccgagtggggtccgcaaaattgaatgttccgaaatggaggacgagaagccggagattctgccgccagatccgccgtatacggcggcgacggtggcggattgcctgtacttcgaggcttccgactcggtgccccggctgcacacgacggactcgagctgctccgagcaggtggtgtcggcggagtttgcgagcgaggtgcagagcgagccgaagacaggcagcaacaac

SEQ ID NO: 7597 - DNA, 255 bp, Glycine max
  Clone ID: 701100090H2
cttgtctctccaccatgcaccaagccatttcccacagaagcttacatccccataggagcacgtggcatgccacacgcaggaggaatcaaagaatccaatggcacctatccatccaaagctgccacaatggtatcggagaacgcggtggtaatcattggaaaacggggatgctgcatgtgccacgtggtaaaaaggttgttacaaggtctgggagtgaaccctcccgtgtacgaggtggacgaggaccacgaagcc

SEQ ID NO: 7598 - DNA, 247 bp, Glycine max
  Clone ID: 701100091H2
ctgagaagtgcgacgctgctgcaaagtgcaagcggatttcgtactcttctttactcccaatcatttctctgtgcaaggataagtgtgttatctatctaaaaacacaagatgtcagctgggcctggacttgaatctctagtagatcagacaatttcagtcattacaaatgatggacgaaatatagtgggagtcctgaaaggttttgaccaggcaacaaatattattcttgatgagtccatgaacgggt

SEQ ID NO: 7599 - DNA, 254 bp, Glycine max
  Clone ID: 701100092H2
ccagcttatagaggtcgttgacggcaaagagagacacaaatgtattctgtttgagtttgaaacattgattcgttgtttcctctgcaaaattaaatcctcattgtgattgttgatgaacaattgaagtgtctctccgatttgaggattccggcgacagcaagcgatgaccaccggcggcgacggtgacacctccaaacaagagctgcttccaccttatcaaacgcttcggagcttgcgtcactttcaagatctcc

SEQ ID NO: 7600 - DNA, 254 bp, Glycine max
  Clone ID: 701100093H2
caattcctcatgaattatgatcatttttttccatctcttcattctacctatagtgcttcctcacctttacccctactagccacccgtttataaatctacatgctagggttagggttattcaccaactattcgttaattgtatagacatagctagtgtgcgctattttatttactatatatctccacaaagctacctatctatctttcccgttttctgggtatgttttcggtgaaatgaagaactgaaaaaggat

SEQ ID NO: 7601 - DNA, 255 bp, Glycine max
  Clone ID: 701100094H2
cacgaatatcttgttgtttggagcgatccgagaaaaactctgtaaacatgttggtttaccaggacctccttacaggtgatgagcttctctctgactccttccgttacaaggaaattgagaatggaatgctgtgggaagttgaggggaagtgggttgttaaaggagcagttgatgtagacattggtgcaaacccttctgctgagggtggaggagaagatgagggagttgatgatgcagctgttaaggttgttgaca

SEQ ID NO: 7602 - DNA, 255 bp, Glycine max
  Clone ID: 701100095H2
tccagagccagcattacgccggggtgattctgtttatcttgtggggttgagtagaagcctacaagcaacttctagaaaatcagttgttaccaatccttgtgctgcattaaatataggatctgctgattcccctcgctatagagcaaccaatatggacagtaattgagcttgatacagattttggcagtacattttcgggtgtgctaacagacgaacaaggaagggtccaagctatatggggaagcttctcaactc

SEQ ID NO: 7603 - DNA, 85 bp, Glycine max
  Clone ID: 701100101H1
gtggcattatcaggatccaactgggaaggttcaaggacctttctcttgattggagctgtaaaagtggaaggcttgtggatatttg

SEQ ID NO: 7604 - DNA, 73 bp, Glycine max
  Clone ID: 701100104H1
gattttagttatctgatgttgttggtgggtatggctttgactggtttctaatcaatgtttccttttctcccac

SEQ ID NO: 7605 - DNA, 269 bp, Glycine max
  Clone ID: 701100105H1
cttgaactcgaatattcactatggcagatgaggtggttctgctagatttctggccaagtccatttgggatgagggtcaggattgcacctgctgaaaagggtatcaaatatgagtccaaagaagaggacttgcagaacaagagccctttgctcctcaaaatgaacccggttcacaagaaaatcccggttctcatccacaatggcaaacccatttgggaatctctcgttgctgttcagtacattgaggaggtctggaatgacagacatccc

SEQ ID NO: 7606 - DNA, 265 bp, Glycine max
  Clone ID: 701100107H1
aattattattatcaccaatcccaacagaaaccgcgagaaaattccccagaaatctcaacacaggagaacaagaaaaaccaaacacagtttatcaatcaaatctttttggaacatagcacaacaattttcagctctgtacaacgttggatttggttcagttatcgtgtgaggaatattagagcatagaaacatggtggctgaagcagaggttgtgtgtcaacaaaacgtgggtgtgttggatgtgaagcattttccaaataaggta

SEQ ID NO: 7607 - DNA, 103 bp, Glycine max
  Clone ID: 701100108H1
ctaagatacgtgtacacatagcaacagaacttggaagagttttgacctaattaaactgcgtgaagaataagactagactagatagaatattgtacttctgatg

SEQ ID NO: 7608 - DNA, 269 bp, Glycine max
  Clone ID: 701100109H1
cacaaatttacattaagcatagtacaaaacaatgaagaccaaactgctagcatttctcctcttctttgccttgactacaaaaccactactacttggagcagctggagctgctccagagccagtgattgatacatcaggcaagaagctgagagctgatgcaaattaccatatcatccctgcagtgcccttcaccatatgtggctttgttggctgtttcactggtggaggcctttcactagacagcatagatgaatcttgccctcttgata

SEQ ID NO: 7609 - DNA, 274 bp, Glycine max
  Clone ID: 701100110H1
cgagttcgtgttcttctccggtggatttctggaaccatgccttgtgggaaggtccacgcctgtgagctttgctaatcctaagaggccactctatggacatctctcgagcatagattccactggaacatcaatgcgattgacatgggttagtggagacaaggagcctcagcaaatccaatatggaaatggaaaaacagttgcttcagcagtcactacattttcacaagatgatatgtgtagttcagcgctgcctagtcctgctaaggatttcgga

SEQ ID NO: 7610 - DNA, 271 bp, Glycine max
  Clone ID: 701100111H1
gaataacagcacctctttctctctgtctctctcccctcgttgatcccaaatctactagggattctcattcgatgcgattcggccggaagctttcgttttgcggatttttttaattattatttttcctggctatcaggaaagttgaaaaaaagctggaccatgacaagactggatgccaagctcccccagaaggtcctatattgtgcatcaacaacttatcactttttggaagtgcagctaccttgagcatgtgttctaagtgccacaaaga

SEQ ID NO: 7611 - DNA, 274 bp, Glycine max
  Clone ID: 701100112H1
aaacacaacaacactctctcttctcgctcttggcttttcgctcttcactcactctcattcattcatttccaccgttcatggatcccgtaagcgtgtggggtaacacgcccttggcgacggtggatcccgagatccatgacctcatcgagaaggagaagcgccgtcaatgccgcggaatcgagctcatcgcctccgagaacttcacctccttcgccgtcatcgaggccctcggcagcgctctcacgaacaaatactccgagggcatgccgggcaa

SEQ ID NO: 7612 - DNA, 280 bp, Glycine max
  Clone ID: 701100115H1
aaagtctataaaagggaaaaaaaataaataataaacagcgaagttacgaagattctgtagagcagaagagcaatggcgtccaacgattccgattcgcagatgaagatcgtacatggcgatgctggttacatacttgaagacgttcctcacttcgccgactactttccaaatcttcctacatatccgaatccccttcgatccaatcctgcttactcggttgttaagcagtatttcgtgcacatggacgacactgttcctcagaaggttgttgttcacaagg

SEQ ID NO: 7613 - DNA, 225 bp, Glycine max
  Clone ID: 701100117H1
attcggttcgatctttctgattgccttcaaatcacacactctcttcaatttctagggttttgctattgctttgcctccgttccccctttctcacaaaaacaacgccttttctcttctccttcgtatctattctttgcgtttggtttttggttgattgaaggcattcacagcgtaattcgttgctgcattttaatcgatttatctaaccaggactgaatgacctaa

SEQ ID NO: 7614 - DNA, 274 bp, Glycine max
  Clone ID: 701100118H1
cagaagccaccgtggtttgaggcactactggggccttcgtgtccgtggtcagcacaccaagactactggccgcaggggaaagactgttggggtctctaagaagcgttaagctattatgttttggcttggatattagattttgtttaggaggcatgtttgaagtacactacatgttttgcatcataccaactttgtatccgttgttaaatggcttgacaatttcaattttgtttgttatttgcatctgagattccgattagttaaatgatgttgg

SEQ ID NO: 7615 - DNA, 270 bp, Glycine max
  Clone ID: 701100120H1
agcagaagttggacaacatttccaatgatatgttatttaggatatacattcacatttaataagaaatgttacagttaaatcacaaacgtggaagatgttttcagtgacactgtgttaggtacatagaatatgtgcacttgtcctaaagctaggttgttttctatgtgcgagtacagtgttgaatcagtatatctagagatgaattcccattttttatgtatatttatcttatccggtgagcgagcgactatttccaagaaccggttgatg

SEQ ID NO: 7616 - DNA, 268 bp, Glycine max
  Clone ID: 701100123H1
gctcaccattattggctacaaaaggcagactgatacaacggtaggtggcaccgactgtgatggggttggcattttgggcatcgcttgggcctttggtggcatgatcttcatccttgtttactgcaccgccggtatttcaggaggacacataaacccggcggtgacattcgggttgttcctaggacgcaaggtgtcgttgataagggcgttgttgtacatggtggcacagtgtgccggtgctatctgtggtactggattggccaagggg

SEQ ID NO: 7617 - DNA, 182 bp, Glycine max
  Clone ID: 701100124H1
gttgcggaagtcctgcaagtgcggcaacggctgcggatgctgcaagatgtacccagacttgagctacactgagtcaaccaccaccgagaccttggtcatgggagtggcacctgttaaggctcaatttgagggtgctgaaatgggtgtgcccgctgagaacgatggctgcaaatgtggaccaa

SEQ ID NO: 7618 - DNA, 272 bp, Glycine max
  Clone ID: 701100125H1
atgatctcctccatgctgatcatttgttttcaaagcttaagaaaaggtgcaatttggctgctgtagtggctgaggctgatcggattcttaggcctgaaggaaaacttattgttcgcgatactgttgagatcattgaagagcttgagagcatggctaggtctatgcagtggaaggttcgcatgacttactccaaggataaggagggtttgttatgtgtggagaagtccaagtggcgacctaaggagcaggaaaagctcgagtatgctattgct

SEQ ID NO: 7619 - DNA, 273 bp, Glycine max
  Clone ID: 701100126H1
ttcagcttcagagccatactttctcttccctctatgtccattcagcttctcacttcaaccaaaaataaaaacggcaactttgatccaaacctcaccttccctttcttaattgaagaaccttttaaatcccttcttctttaacactaccctttactcttcttaaatctctatcttgataataacattcacccatttcctcacttgtttcatttcttcacattggaggcttagggttctactcattttgatgcttgagttctgtggtttctaagg

SEQ ID NO: 7620 - DNA, 271 bp, Glycine max
  Clone ID: 701100128H1
ctcatctcctccaaacccaccttccgctcctcccctacccttatctccgccactcgccgcctcctcgcctccgctctcctcgacgacccttccaacgcctacttcgccctcctctcccagcactgcatccctctccactccttcaaatacacctacaactccctcttcctctccccaaccttcgattccgtaaaccccgaatcctcgttccgcttcggcctccgcctcatatacaaatccctcgtcgagatcctctcccacgcgcccaagc

SEQ ID NO: 7621 - DNA, 270 bp, Glycine max
  Clone ID: 701100129H1
gagaaagtagcagatcctccatggcctccaccaaggaacgtgaaaacttcgtctacgtcgccaagctcgccgaacaagccgaaacctatgaagaaatggtggaagcaatgaagaatgtggcgaactaaacgtggaattgacggtagaggagcggaaccttctgtcggttgggtacaagaacgtggtgggtgctcgtagggcttcgtggaggattctttcctcgattgcacagaaagaagaagctaaagggaacgatgtgagcgtgaagag

SEQ ID NO: 7622 - DNA, 253 bp, Glycine max
  Clone ID: 701100130H1
cgataacgtgaaagctaagattcaagacaaggaagggatcccacctgaccagcagagacttatctttgcgggtaaacagcttgaggatggtcgaacccttgccgactacaacatccaaaaggaatccactctccacctcgtgcttcgcctcaggggtggcatgcaaatctttgtcaagcactttgactggcaagaccatcacctcgaggtcgaatctccgacaaccattgatatgtcaggcccagatcaggac

SEQ ID NO: 7623 - DNA, 279 bp, Glycine max
  Clone ID: 701100133H1
gtttttaaactgcgcaatatttggctaccagacagagttatctcacacactgcctaaatcagcaacaagagcagcaatgcttgtgagggttaatacccttcttcaaggctactcaggaatcagatttgaaatcctagaagctatcacgaaactactgaaccacaatgtcacccccatcttgccattacgtggtacagttactgcgtctggtgatctaattcctctgtcctacattgttgcattgctaactggtaggcgaaatagtaaagctgttggacc

SEQ ID NO: 7624 - DNA, 274 bp, Glycine max
  Clone ID: 701100134H1
actcgagccgattcggctcgaggaactgctagcatgggctaccaaacttctgtaaatatgtaccctagattactgattttcacttatacagattaccaccaaagtaatcaatgtcttatgttaacttttctgcccatttcacttgcctgtatagaatggtacacgaggaagacaaaaataggtctgaggaaaatatttctcttatttcctgaattcctgttctatatgtaccgtctttctacatcttttgctctttattgtttgatgcaactta

SEQ ID NO: 7625 - DNA, 254 bp, Glycine max
  Clone ID: 701100136H1
gcaaagccctgggttcatggttcagcttcttcatcctaaggaaaataattggcgtttggctgaatcatggaatagattggatcaagataaacaagatgacaagccagttgcttctgatgggatgataataaagtataaaccacctgtaggtgaaaaactaaagcccgtagttcctctatctcctggtttcgaaaatcaaccagaacctgagctttctgctgatgggctgaaagacttgtgcatcagttctgaat

SEQ ID NO: 7626 - DNA, 265 bp, Glycine max
  Clone ID: 701100137H1
caccaaacgccccaagcacgacaacaacggctcttccttcgactccatcgatgtgaattcgtattcggtaccgtcgatttcgccgtcagcggtgtcgtactcgcaccaggtcggcggtgcgagcaagaagattgatatccccaatgggagggttggtgttatcattggaaaaggtggtgacaccatcaagtaccttcagctgcagtctggtgccaaaattcaagttactcgtgatatggatgctgatccgaattcggctactagg

SEQ ID NO: 7627 - DNA, 268 bp, Glycine max
  Clone ID: 701100138H1
tgaagaccttgcagagcagattggaaaggatatatattttgatcttgtagaccatgacaaagtgaggagtttccgtgttcaaaaacagacgtcttttaacctttttaaggaagaggttgctaaagagtttggcataccagttcaattccagcgcttttggctatgggcaaagcggcaaaaccatacgtatcgtccaaatcgaccattgacacacatggaagaagcacaatctgttggacaattgagagaggtatcaaacaaggttcac

SEQ ID NO: 7628 - DNA, 265 bp, Glycine max
  Clone ID: 701100139H1
ctttattcacaatgagaagcccatagcagagtctcttgtgattgttgaatacattgatgagacatggaagaacaaccccatcttgccttctgatccttaccaaagagccttggctcgtttctggtccaaattcattgatgataaggtttttggtgctgcatggaaatccgttttcacagctgatgagaaagagcgtgagaagaatgttgaggaagcaattgaggctctgcagtttcttgagaatgagataaaggacaagaagttc

SEQ ID NO: 7629 - DNA, 266 bp, Glycine max
  Clone ID: 701100140H1
aaatcgcactctgcttttcagaaagcacagagatgcgttgaagagtgttcgggttccctccatctcctcgccgccattcaccgcttccggcgccggcggtggccccgtcatcgaattggccaccacctcgtttctcaatcccaatcgctcttacgcaccgctaagtaccgaggatcccggcaattccagtaggggtccaaatgcaattacagtggggctacctccggcgtgggtggatttatcagaagaaatatcagcaaatgtgc

SEQ ID NO: 7630 - DNA, 271 bp, Glycine max
  Clone ID: 701100141H1
aaaagacttccttttttgcaattgtcatttgtcaccaaacaattgttgttagctctcacaagcaagcttcagcaacgacaatgaaggtcagaactagatgaagaaaccaatctcttttataattacctccctttcatccactaatcaatgtttctaattgagtttaattttctcagggatagccttacactggtttgtgtccactagatcttgtatttaactatttcctttcatgtgttaaatgtagaagtacattaactattgggtctta

SEQ ID NO: 7631 - DNA, 271 bp, Glycine max
  Clone ID: 701100143H1
ctcctatactctatttttcgcgtcacataaacaaaaaaaataaactggggagaagcatgttgttgatgttgggactatgcttcctattgttctctgcatttccacttgcgttctctgacagatgccacccacaagacaagaaagcgttgctccaactccagaaggacctcggcaacccttatcacatcatatcctggaacgcaaaggaggattgctgcgagtggttctgctgcgttaagtgtgacgagaaaacaaaccgcgtcattagcgt

SEQ ID NO: 7632 - DNA, 270 bp, Glycine max
  Clone ID: 701100144H1
gttttgagttttgatcaatgagactagccatgtctactccttccaagagcataatctgttcaagtgaagatgattatgaacttagaagagggccatggagtgttgaagaggattatcttctcacccattacattgccaatcatggtgaagggagatggaatttgctagctatacgttcaggactaaggagaacaggtaagagttgcagattgagatggctcaattatctaaagccaaatgttaagagaggaaatttaacctcggaagagc

SEQ ID NO: 7633 - DNA, 271 bp, Glycine max
  Clone ID: 701100145H1
cttgtttgttgttgttgttggaagccaaaaccctagcagccggcccgaatggcagacgttgaggttgatgtggcggcggcggcggcggcggcggctgcagggcagccaaagaagagaacgttcaagaagttcagcttcaggggggtggatctggacgcgcttctggacatgtccactgacgaactcgtgaagatgttcagtgctcgcgcacgcagaaggttccagagaggtctcaccagaaagcccatggccttgattaaaaagctccgca

SEQ ID NO: 7634 - DNA, 251 bp, Glycine max
  Clone ID: 701100146H1
ggcgagtttgggtgaaggagcgttccggagcgtggtgggaggagtgtaacaaacccgaatttccggaagaagggttcaaaaaggcgttcagaatgggaaggctcacttttgaagcgatatgccaggagcgcaattctgtgatagcgaaggaagacacgacgctgagaaccgccattccggtgaaacaaagggtggcggtttgtctgtggcggtttgccaccggggaccctctgagcgtggtttccagaaga

SEQ ID NO: 7635 - DNA, 279 bp, Glycine max
  Clone ID: 701100148H1
aatttatcgagtctctatcggctagtgagattgaactctctgaggattacacctgtgtgatttcccatggttctaatccaaaaacaacccatattttctgtgactgcattttggaaagtcatgttaatgattctgaaagacattataaggctgaagaggagggaacgggattgccccttttcagtgttaacattttgcatactccaagccaatatccttctcatgacttcttaagtgtctgtcaccattgcaacaagaagttggaagatgggaaagata

SEQ ID NO: 7636 - DNA, 270 bp, Glycine max
  Clone ID: 701100149H1
tattttgcagcaagagaaaaagaatgtgccggaaatcacccaacctgtggttggcagaatgaaggagaggttatggtcaaagcaagcaaggtcgaagaagaaaaaggaggaacaatatataactgcagaggagttgttggccagcaagcaacaacaagagttggaggttgttcagaaggtttatgatatgaggggtgcacaggttgaggtattaacaaattggccggatttaaatgccgaggagaaagcaaaagaaaatgatgtcccgat

SEQ ID NO: 7637 - DNA, 75 bp, Glycine max
  Clone ID: 701100150H1
ccacaataaacccctttctctcaattttcattcaacaccatggaaagacacaccaagtccattttcttcaccttc

SEQ ID NO: 7638 - DNA, 254 bp, Glycine max
  Clone ID: 701100151H1
cgaggctttagataagcatgaccggataaaggctgtagaaatattagtgaaggatttgaaagtgtttgccacatttaatgaagaattgttcaaggaaatcacacagcttcttacattggaaaatttcagggaaaatgagcaattgtctaagtatggtgatacaaaatctgcacgagcaatcatgttggttgagctcaaaaagctaattgaagcgaatcccttatttcgtgacaaactgcaatttcccaacctta

SEQ ID NO: 7639 - DNA, 119 bp, Glycine max
  Clone ID: 701100153H1
atccagtaatcatgtctagtggagatggtaaacaaagtaacgatgatgattcaggtgttttctcatcagaataccgtcgcaagataattatagtatcaaattctcttcctctcaatgca

SEQ ID NO: 7640 - DNA, 261 bp, Glycine max
  Clone ID: 701100154H1
atgagatctgctggttgggatattgatgcatcagtcaaggccattatggagcagaatgtggtttactggaaagaagatcacaagtgttttgcaattgagtcctttgtgtgtagggagatgtttgattcattcaacttccccaacttctccctaccaaatgagtccctaccagataggaacaggaggcaactgttctttgggaggttcaacgagctaaaaccagagaaagcaaaggactttcttgcagggaaaccaagatca

SEQ ID NO: 7641 - DNA, 264 bp, Glycine max
  Clone ID: 701100156H1
atcaactcttctctttctctttctcttctcttctgtcgaagaagaagaagcagaagtagttacagaaacatgctggagaatcttcaggctcctccgccaacggaatcggccccagtggtgaagcgctatgctcctcccaaccagaggcaccgttctgccaacaggcgcaaatcatctgatcggcttgatcggacaaacagtatcgggaatgacttagaaaagaatcaagttgcttattcaagaagtgttcacattccagatcac

SEQ ID NO: 7642 - DNA, 172 bp, Glycine max
  Clone ID: 701100157H1
ctgctgttggagccctttggggttgtggccatgatgccggtcaagctatctttggcttaatatttttgctcttaaaagatcgacttcacattgaaattatccaaacttggggcacccgtgtggttggccttaccctgctagtaattggtgctatgggaattaaggaaccttc

SEQ ID NO: 7643 - DNA, 268 bp, Glycine max
  Clone ID: 701100160H1
gaggcagaccactatcagtaggaaagaccatagggaggaggggaatgaggctgatggattttatggtggaataagaaagattaagagtgaggcggagattaccacttggaaacacctttggccattggaagtcttggaatagtaagcactggcactggatcggatcaaattctctacaacttagcatgatttcaatatagaagctttgtttcagcaactgaagcattgactggttctgcattatacaacctgaagtggactttcagat

SEQ ID NO: 7644 - DNA, 66 bp, Glycine max
  Clone ID: 701100161H1
tcgaagctcagctcagctccagcttggagggtccatggtccactttctggatctcagcgtcagcca

SEQ ID NO: 7645 - DNA, 274 bp, Glycine max
  Clone ID: 701100162H1
ctcgccgcgagtcgcttcaacgagatccgtcagattttccgtcagccttctagggctttctcaaccgacctgaactaccaccttgacacaccggacaacaaccctaaacttccatgggaattcaccgaggccaatcaagcaaaggttaaggagattttgtctcactatccatccaactataagcaatctgctacaattcctcttttagatcttgcccagcagcagcatggaggttggctacctgtttctgcaatggatgcggtagctaagattg

SEQ ID NO: 7646 - DNA, 278 bp, Glycine max
  Clone ID: 701100163H1
actagctattagctatagctagacgtccctccaatccctctttgtctttgtgcttttctagttccttccaaaataccaacaaaagcaaagacaatgagttgccaagcatggcccgaacccatagttcgagtccaatccttagctgaaagtggcctaagttcaatcccttcacgctacattaggcctcactcccaaagaccctccaataccacttcttttccaactcctaaaccttttcaaactgatcatcatcatggtcatgatcagaaaacttccga

SEQ ID NO: 7647 - DNA, 272 bp, Glycine max
  Clone ID: 701100165H1
cgctgtttcgacggtcacacgcagttgtattgtagaactgaccaagggtttctctttctctttctctgtctgcttcttcactttctctcgtttcaatcgaaaaaaatcatgggcagaaaattcttcgtcggtggcaactggaaatgcaatgggaccactgatgaggtgaagaagattgttactactttaaatgaagctaaagtccctggagaagatgttgtagaagttgttgtgagccctccttttgtgttccttccttttgtaaaaagttt

SEQ ID NO: 7648 - DNA, 191 bp, Glycine max
  Clone ID: 701100166H1
gtttggagcgatccgagaaaaactctgtaaacatgttggttcaccaggacctccttacaggtgatgagcatctctctgactccttccgttacaaggaaattgagaatggaatgctgtgggaagttgagggcaagtgggttgttaaaggagcagttgatgtagacattggtgcaaacccttctgctgagggt

SEQ ID NO: 7649 - DNA, 266 bp, Glycine max
  Clone ID: 701100167H1
ctcgagccgcggcggatcgcgaggaactgtgaggcggtggtggtggcggtggggtaccggcacggcgccagagaatcggtacccggcggcgttcgaggacgggatgaaggtgctgaattggctggcgaacaggcgaatttggcggagtgtagtaagttgatggggggtaggaggttggagggccagcacaagcatattgtgggttcctttggggcatcaatggttgagccttggttggctgctcatggaaatccttcaaggtgtgt

SEQ ID NO: 7650 - DNA, 263 bp, Glycine max
  Clone ID: 701100168H1
gggcaatcatcaatccagcgatttcgaagcagatgaaagaaggactagaacaaaaaacgttggtattattattattattcaatccttcaatatccatatgcataccaacaagacacgctttttcgttcaatctccatagcgggggatgtagcatgccataaaagcaggtgctctggttccttgtcatccggaaagaaatactgtagatctgggttagcaatggctcctggaagcagtgttttcaaagtagttcttgactctca

SEQ ID NO: 7651 - DNA, 266 bp, Glycine max
  Clone ID: 701100169H1
ctctcacaaacggaaactaaactacgttttttattttttccagacaataatacttcactatttgagtgtgatcgatggcatacccaaacccttatccggctcagccctatccctccgcctccgcgccgatgccggcggttccctccgccgtgatcggcccccagttctgcgcgccgtacccggtggatctggcggtggtgaagaaggtgatgaccatctctgacaacttcgttgtcaccgacgtcaacggcaacatcgtattcaaa

SEQ ID NO: 7652 - DNA, 265 bp, Glycine max
  Clone ID: 701100170H1
cggctcgaggaacaatggcagatgagggtgctatttctctatggagaggaaacactgctaatgttatccgttatttccccaaccaggtattgaactctgcatttaaggattacttcaagaggcttttcaactttaagaaggatagagatggctactggaaatggtttgctggcaacttggcctctggtggtgctgctggtgcatcatcccttttgtttgtttactctcttgactatgcccgtacccgtcttgccaatgatgcaaa

SEQ ID NO: 7653 - DNA, 251 bp, Glycine max
  Clone ID: 701100171H1
cactcgagccgaatcggctcgagctcgagccgcacgcaccaaccagagagtgtgatagagagaacacgactcttccttccttcaaacccttcaaccacgaccagcatgcaagactccggctccatgaagatctcccctctggatctcatgtccgccatcatcaagggtaagctcgacccctccaacgtctgctcctcctcctccaacgccgcagctgccgtcctgctcgagaaccggcagttcctcatggt

SEQ ID NO: 7654 - DNA, 267 bp, Glycine max
  Clone ID: 701100172H1
actcgagccgattcggctcgagcaattcaataccatttaccaaactcactcatcaattctcatacttcttctcactaactattacttcatcatgtcgagcacagctggccaagtcatcaaatgcaaagctgcggtttcatgggaggcagggaagccacttgtgattgaagaagtagaggttgcgccaccacaagctggtgaagtgcgtttgaagatcctctacacctctctttgccacactgatgtttacttctgggaagctaaggg

SEQ ID NO: 7655 - DNA, 269 bp, Glycine max
  Clone ID: 701100173H1
gctccatagctgcagcattagggtttttcatctgcttcaatggggaagggaacagggagttttggtaagagaaggaacaagactcacactctctgtgtgaggtgtggccgccgcagcttccatctccagaagagtcgttgcgccgcttgtgctttccccgccgcacgcactaggaaatataactggagcgtcaaggcaatccgcagaaagaccaccggaactggcaggatgaggtacttgcgtcacgtgcctcgccgattcaagagtgg

SEQ ID NO: 7656 - DNA, 265 bp, Glycine max
  Clone ID: 701100175H1
ctcgagccgttgaatcccattattttctgcgtcaattttgctgaaaaccttaagtgggtatcctgaaaacactagattttcgattcgtttggtaagcggatttttaggtttgattattacgtttttctgttcttgttggatatggaggtttcggtgattggaagctctcaagcgaatctgggagcgtcggaattggcatctagggaagttggattttgcaatcttaagaacaatttaagggctttgaatgatagagttagttttg

SEQ ID NO: 7657 - DNA, 269 bp, Glycine max
  Clone ID: 701100176H1
caaaaaacaaaatcacaaaccaaccttagcctagagacaattaagaagctagtttgcttgtttttcagtgaactcaaggcatacactttatctcttgagatacgtactaagattcatttaagaaattgatatattcccataattaatttgaaagaagatggaagtgctggtacaaagtcctagtagtccaaacatggatactttcgattttggtggcaacatgggttcgatctttcaaagtgttccttcttcaccaaaagggtttggta

SEQ ID NO: 7658 - DNA, 268 bp, Glycine max
  Clone ID: 701100177H1
agcagcttgaggatggccgtacccttgccgattacaacattcagaaagagtcgaccctccacctggtgctccgtcttcgtggtggcatgcaaatctttgtcaagaccctcactggaaagaccatcacccttgaggtggagagctctgacactattgacaatgtcaaagctaagattcaagactaagaaggtatcccaccagaccaacagatgctcatttttgctggaaaacagcttgatagatggccgaaccttgggagattacaaca

SEQ ID NO: 7659 - DNA, 270 bp, Glycine max
  Clone ID: 701100178H1
ggatatttcagtcgccgctgtgacttgcctcagatctaggtcacctctttcattttctttgctattcttgtcatcttcactgaccccatttttcccttatctccgttttctagatagagccaaggcatttaccttgtcaattatttggtgctggttagtttcttgaataatcttttgtctgtttttccatggatcgatcataacgaggaagaaatacaaggttttgggacctcttctcttggcttataaaaagtccaaaacaggagcctt

SEQ ID NO: 7660 - DNA, 273 bp, Glycine max
  Clone ID: 701100179H1
caaacaaataaagcaaaaggcctttttattccaaagcaaggcaggaagaaataaaccgaatgagagcattaacctcttcttcttccactttcattccaaagcgttattccttcttcttcttcctctccattctcttcgctcttcgatcctcgtccggcggctgctccgaataccaccaccaccaggggccgatggccacgttaggaggcttacgcgtctcccaaggctctcagaacagcgtccaaaccgaggccctcgctcggttcgccgtcg

SEQ ID NO: 7661 - DNA, 279 bp, Glycine max
  Clone ID: 701100180H1
gagaaagtagcagatcctccatggcctccaccaaggaacgtgaaaacttcgtctacgtcgccaagctcgccgaacaagccgaacgctatgaagaaatggtggaagcaatgaagaatgtggcgaagtaaacgtggaattgacggtagaggagcggaaccttctgtcggttgggtacaagaacgtggtgggtgctcgtagggcttcgtggaggattctttcctcgattgaacagaaagaagaagctaaagggaacgatgtgagcgtgaagaggataaagga

SEQ ID NO: 7662 - DNA, 273 bp, Glycine max
  Clone ID: 701100181H1
aaaagagctccctcgtgaagttgtgactgaaatcaaattgctccgactcccatttcagccagaatccacacctaatgcaatggaagtggagtccttgaatgaaaagagtataaggagaatccacaaggcattggactctgatgatgttgagctactgaagcttcttctaaatgagtctagtgtcactctagatgatgcacatgccctgcactatgcttgtgcctatagcgattctaaggttattcaagaagttcttagtctaggcatggctga

SEQ ID NO: 7663 - DNA, 266 bp, Glycine max
  Clone ID: 701100182H1
gcagaggctcacttatcgcaagcggcatagttatgctaccaaatccacccagcaccgggttgttaagacccctggagggaagttggtgtaccagaccactaagaagagagcaagtggacctaagtgccctgtcactggcaagaggatccaagggattccacacttgagacctgctgaatacaagaggtctagattgcctcggaaccgcaggaccgtaaaccgagcctacggaggtgttttatcaggaggagctgttagagaaagga

SEQ ID NO: 7664 - DNA, 172 bp, Glycine max
  Clone ID: 701100183H1
atgagcttcgttggtctctcgtccgtgttgtaatgatggatcgggtactagctagttctgcagttccactgtgttgtaatgtctggttttgtttgaagtgcttataagcatgattaatttgctgtgttctgcagtagatgaatgaaaaaaaaaaaaaaaaaaaacagaacaa

SEQ ID NO: 7665 - DNA, 263 bp, Glycine max
  Clone ID: 701100184H1
ctcgagccgcttcaacttcacccattcatacgtggtgttgttactgctgctcttttctcttttcttttctctttagttctcccttcccctttctttttctttttcttcttcttctgagcttgtttaagcttttcttccattaacatattatcacaatgtgtggtattcttgctgttcttggttgttctgatgactctcgagccaaaagggtccgcgtgcttgagctctctcgcagattgaagcaccgtggccctgactggagt

SEQ ID NO: 7666 - DNA, 261 bp, Glycine max
  Clone ID: 701100185H1
gtttgttaataaaaaagaagcagtggtttcttccaacgagttggaaaatggtttgtctttagatccaacccccgatgagattgctacaaatgaggaggaccatgaactggagaatgaagaatcagaaaatattttacctgacaatcaagaaagagacattattggatctgttgacccggatgcaccacctgatccagagaaaatcaggctggagcaagcagcatcaaaggcacaagctgctttcaggggttacttggcacg

SEQ ID NO: 7667 - DNA, 113 bp, Glycine max
  Clone ID: 701100186H1
agagaacccataacagctagttaatggccctcgctttcacttcttcaatttccgcaccaacttccaccaacccatcatcggaacccaaacttccgcaaattgggtcaattagg

SEQ ID NO: 7668 - DNA, 264 bp, Glycine max
  Clone ID: 701100187H1
aagcaagggagcaataatataagttggtgtttgcctgtattaaagaagcgtgacattcttacggctggtggtatacttggagctttggcagctgttgctgtagctttcagattttacagaagggcaagttgaaattcactttattctcaagatttagatctcaagggatctgatttagttggttgaaaatgatgtatgattattttaaattttctcgattcctgcgtattaaaaaaaattctcaagttttagattcatggggga

SEQ ID NO: 7669 - DNA, 264 bp, Glycine max
  Clone ID: 701100188H1
ctcgagccgcagcaactgcggttgcaacaagtactcttttgacttgacttacgttgagaagaacaccacagagactctagttttgggtgtcgggcctgtgaaggcccaattggagggtgctgaaatgggtgttgcatctgagaacggtggctgcaactgtggatcaagctgcacctgtgacccatgcaactgcaagtaaggtcaagatgtataaccttgaagcagagatagctgtaatatatgtatcaacagctactaagaagt

SEQ ID NO: 7670 - DNA, 268 bp, Glycine max
  Clone ID: 701100189H1
cattccttcatttttaaacctagctccatctccctccactcaccataacatgccatcagaagcaactgctgccaacaccaacttctgtgtaaatgttagcaacaatggctacattagtgctaatgaccccttgaactggggtgcggcggcggaggctatggctgggagccacctcgacgaggtcaagcgcatgctagaggagtaccggaggcccgtcgtcaagctcggtggagagaccctgaccatctcgcaggtcgcggcgatcgcg

SEQ ID NO: 7671 - DNA, 267 bp, Glycine max
  Clone ID: 701100191H1
cgcgtgtactttcttgcgaaacagaagggcgaaggggcacacacaacttttttgtttttttgtagagcgagagagaaaaaaatgttggggatcttcagcagttccgtggtgtcgccgccggaggagctggtggctgcccgcagcagaacgccgtcgccgaagacgacggcggggaagctgctgaaccggttcgtggagaacaaggcgtcggcggtgtcgctgcaggtgggagaacacgtgcagttggcttacacgcaccacaacgag

SEQ ID NO: 7672 - DNA, 266 bp, Glycine max
  Clone ID: 701100192H1
ctcatgccctcaggtgcagagagcctgaaggtgaagagttactcacttacatgcaactgtagtgcgaaatctgcccctacttaaaatttggttacatggctgccaatggagccattgcgcaagatgcagaaacgaggatcacatacacatcatagactacgaaattgctcagggaactcaatggatgactcttcttcaagcccttgctgcaagacctggtggtgctccccatgctcggatcacagggcttgatgatcctgtttcca

SEQ ID NO: 7673 - DNA, 258 bp, Glycine max
  Clone ID: 701100193H1
gatatatgaagttcacagaaccttcggggattattcagcatggggtttttttcttgtatttctctctctcgaatttgtcctagcatatgaccaaattaatgtttactagtgtgattggatctcccgttgaaaactcaaagctatgcttctgttgaattcactttcgccgaataataggagtattttgaatctttctatgcaaaatatccaaatgtacacgctctattaagtatgaaccctccttttccgttttcattt

SEQ ID NO: 7674 - DNA, 268 bp, Glycine max
  Clone ID: 701100194H1
gcaagcttaaagttatgtaaaaaaataagggggtgtgaggaaatggtgcacagcgcgtacgattgtctggaactggtgcgcgagtgcccagccaagatcgaatccatcgaatcctacggttcgaagcttctcgtgggctgctccgatggatcgctccgaatattcgcgccggaaacggaatcttcctccgacggctccaagtcctacgccttggagaagaacctcgccgggttcgcgaagaagcccgtgctctcaatgacggtggtgg

SEQ ID NO: 7675 - DNA, 275 bp, Glycine max
  Clone ID: 701100195H1
tataaccatgaggagttctccagattaatggttcaggatgatttgaagtgtgcagcattttggggatctgatgggaagctctcaaaccacattgtcaacgggaattctgcatcagttctaaaatgaagctctcataatgtttggattaccgtttgcaggtggtgaatctatattgaaagtacgtagggagaagcatgcttttgttacttttgagttaataactttggaaggattggaacggtcatccaaacatacacttggttttagtggagatg

SEQ ID NO: 7676 - DNA, 284 bp, Glycine max
  Clone ID: 701100196H1
ctaccattaacattaccctctcttttttttctccctcacgaaccttcatttcttctcccgccatggatccttgccctttcgtgaggctcacagtcggcaacctcgccctcaacattcccgttgcttctaaacccgcgctctccgttgttcatccttcttcttctccttgtttctgcaaaatcacgctcaagaattttcctcttcaatccgccgtcgttcctttcattcctccggaaagccacttccccgactcgcaggtgcatcctattgccgccacgttccac

SEQ ID NO: 7677 - DNA, 123 bp, Glycine max
  Clone ID: 701100201H1
attctgggcacctaaaagttgcagactttggggttagcaagttgctggcagttaaagaagacaagcctgctaacttgccaagatacttcctgccgctatgtggctcctgaagttttcatacaa

SEQ ID NO: 7678 - DNA, 169 bp, Glycine max
  Clone ID: 701100202H1
ctcttcttcttttgttgttctgtgtttgtgtttgttttttctctcacctgaaaatgtcttgctgcggtggtaactgtggttgcggaagctcctgcaagtgcggcaacggctgcggaggctgcaagatgtacccagacttgagctacactgagtcaaccaccagcgagac

SEQ ID NO: 7679 - DNA, 252 bp, Glycine max
  Clone ID: 701100203H1
gtaccggtcaccgaatgctaaaggacacaaaaacaattggatctgcttatgaccgctaccttcagagtgggcaactttcttcatttacttctggggaagccagtacagttgggggtcttgggttggctaggggtggtggtggattatcagaccattcactagctgatccgcctgtcatggggcgtcatgggggtggtggtccagatctagcaccaaatggacggggtgttaactatggtggtcagctacctg

SEQ ID NO: 7680 - DNA, 268 bp, Glycine max
  Clone ID: 701100204H1
gtgatttggagtttggagcgactgaactaatcattaatttgcactcgctgtttcagcttcatcacccttcttttacatcatttatatctcttgagaaatggcacaagaaacctttctattcacatctgaatctgtaaacgagggtcaccccgacaagctgtgcgaccagatctctgatgcagtacttgatgcgtgccttgaacaggaccctgacagcaaggttgcctgtgagacatgcaccaagaccaacatggtcatggtcttcgga

SEQ ID NO: 7681 - DNA, 171 bp, Glycine max
  Clone ID: 701100205H1
acagaatgttgaagcttggactgagcattgacgaggatgcaggtgaagctgatgctgaaatgcccccactggaggaggccgaggctgatgctgagggcagcaagatggaggaggttgattaaaattaaatatgatgcgtttcttgttagtagcgtctctaatgcctttttg

SEQ ID NO: 7682 - DNA, 212 bp, Glycine max
  Clone ID: 701100206H1
gagagaacaagaacataagggaaccacagcggcggtaacagaagaacaagcagagaatgggtcgagtgagaacgaagacggtgaagaaatcctctcggcaggtgatagagcgtcactactcgcgcatgaccctggacttccacacgaacaagaagcttctggaggaagtggcgataatcccgtcgaagaggctagggaacaagatcgggggg

SEQ ID NO: 7683 - DNA, 253 bp, Glycine max
  Clone ID: 701100207H1
cttctctcaacgtttgctcaccccaactcttcttccagtctccatctccatctccatcaaatttaactatggctactgaagaggttttggttgatgaaatcacttacccttccaagatcactactaccaagcccctatctttgcttggccatggaatcaccgacatggagatccactttatccatgtgaaattctatccaatcgggatttatttggaccctgaagtagttggccacttggagcagttcaaagg

SEQ ID NO: 7684 - DNA, 269 bp, Glycine max
  Clone ID: 701100208H1
cagacattgaatcccagctgaagttctttgagaccccttcttttcttgatgaagcctgggctgatgctgcattggcgtctttgctcagtgaagatgcatctcaggatgctgctggaaaccctatgaacctttggagcttcgacgacctgccttccatggcaggagtcttctgaacaccttcatatcccttttaatgtaaataaagctacaagaattgtgatcgtgatgttggtgatggaatccacagcaggaaaaccaacctgcttaag

SEQ ID NO: 7685 - DNA, 177 bp, Glycine max
  Clone ID: 701100210H1
aaaatggtcttcagtgttataatttgtgtaataaaaaagtagtacgtggtctgtactgtgttgtctgtaccaaaataataaacacatgcatgtaagggggtggacaccatgcatcctgtgtgttttgttgaagaatcaagtgaatttcagtttgaaacagtttacaaaatttgatcc

SEQ ID NO: 7686 - DNA, 260 bp, Glycine max
  Clone ID: 701100211H1
ctgaatcacttctcttactctgcaacaacgtcgttttccttcttcttcttcgtcttcttcttctttgctcatccggctcagttcgcgctctcagtaaaacgcgctcaagtgtcgccgttttctgcaaattcagctagggtttcactctcgccgcgatctctcatcctagctcgccgagttcgggttctaatcgccgcgtctaagttcactgtttctctgaatcgaagaaaggacttcgaatttcgctgctttcagttagt

SEQ ID NO: 7687 - DNA, 252 bp, Glycine max
  Clone ID: 701100213H1
ctgattaccaatccatcgtttttgaactccacataaggctaaactaaacacctctctctgcaaaacaaaaccactctcttccttccaacgaatctctgccacacaacaaataacaatcgaacatataatcaacctaagacccgcctctgattctgaacaacaaaaggctaatttggctcttttgacgacaatttttgctgacacctaaagcatctagcagcttatcaaaatggagtttaaccatacagcaaa

SEQ ID NO: 7688 - DNA, 259 bp, Glycine max
  Clone ID: 701100214H1
gccgtgcaagaagttggtgttttatttccacgacataatttacaacggccacaattccaagaatgccacttccgccattgttggaacacccgcatcgggaaacaggaccatactagcggggcagaaccacttcggtgacttggttgtgttcgatgaccccatcaccttggacaacaacttgcactcgccaccggttggacgtgcccaagggttttacgtttacgataagaaggagattttcaccgcttggcttggcttc

SEQ ID NO: 7689 - DNA, 224 bp, Glycine max
  Clone ID: 701100215H1
cgatgttattgaatttgtgacactatctggagtattaactgccaaaaagattccagccatccatatcaccagtgcctcagactcacaaaacggtgaagctcaggatggattttatattgaattggattttccggttgatcctgttacagaattcagctttgatgagagtacttcactactttctgaggcattgaacggtgcatccataattgttttaaaggggc

SEQ ID NO: 7690 - DNA, 267 bp, Glycine max
  Clone ID: 701100216H1
ccacaggagagactgcacctttttaaggcagatcttttgggtgaaaattcttttgactccattgttgagggctgtgatggcgtctttcatactgcttctccttttattatcaacgtcaaagacccacaggctgacctacttgacccagcagtgaagggaactcttaacgttcttaaatcatgtgtaaaatcgccatctgtgaaacgagtcatcttaacatcttctgtggctgcagttgcatataataaaaggcctaaaagtcctgaa

SEQ ID NO: 7691 - DNA, 226 bp, Glycine max
  Clone ID: 701100217H1
ctccctcatgggaatgaagaagaatgttacttggctgttaatcctccatccgatcgtattccagatatagaaatgcacccaactgagccacactggttgaatgacttcagcggggtgataaaaagtgtttatggacctgttacagctgcaaaaactatttatgaggatgaacaaggttacttgattattatcagttctgccctttgtagatcttcaaggtgtgaaa

SEQ ID NO: 7692 - DNA, 260 bp, Glycine max
  Clone ID: 701100218H1
gtacagcatttttggagcaccccatatcagacgatatacttcagttactctttgaagtctccaactcttctaacttggaaaagtccttagagattctcattcagaatgccaaatccgattctgggcgtttggaactagcttctaaaaagattcttcctgcagtacttaatatagttcactcactcactcatgcttcacaccaccatcagcgtaatcatattctttctttgtccttcaaagtcctcagaaacttgtgtgct

SEQ ID NO: 7693 - DNA, 166 bp, Glycine max
  Clone ID: 701100219H1
cattggtgtccctgagcccttgtcagtgtttgtggacacttatggaactgggaagattcctgacaaggagattctgcaaattgtgaaggagaatttcgacttcagacctggaatgatcaccattaacttggaccttaagaggggtggtcataggttcctcaagaca

SEQ ID NO: 7694 - DNA, 206 bp, Glycine max
  Clone ID: 701100220H1
cggctcgaggtttcatcaactggaacatttgtagaactaagcctcttctctcccagccgcagtgcaacccctccaggatcgcctcctcttctaggttggcctatgcgatccccaacacaagttattggaccatagaggcaggcgggaaactgaatatgttgggtgaatatcaattttgtggaaaaaagggaaaaaaactgattggt

SEQ ID NO: 7695 - DNA, 211 bp, Glycine max
  Clone ID: 701100221H1
caaccttcttgccctctctcatcagagaaggaaagcttttgataaagaaaagaaacagaaagaaccttgtaattttggcttgaaaagccatggccagggagcaaattcaggtgctgaacgcgcttgatgtggcgaaaacacaatggtaccatttcactgcaatcatcattgctggaatgggcttcttcaccgatgcatatgatctattctg

SEQ ID NO: 7696 - DNA, 178 bp, Glycine max
  Clone ID: 701100222H1
aaatccttcaaacatcgttttatttttcttctctctaaactaaaaaaaatgaagggcaccatagttctacaccctgccatgggcaggggacacctagtccccatggtagaacttggcaagttcatatacactcaccaccaccaaaacctccccatcaaaatcctcctcccttcgccgc

SEQ ID NO: 7697 - DNA, 237 bp, Glycine max
  Clone ID: 701100223H1
cttgtttcttttttgtcggagaaaataataataacaatatataacgtcggttgaggagatcgcagtcacagaagaggaatgtgtttgacgcagaaacggcgtcgtccttggtgaaggagctgagggacaacttcggttcgggaaggactcggagttatgaatggagagtgtcacaagtgaaggctctgttgaaggcggtggttgataacgaggaacagatcgtcgacgctcttcgtt

SEQ ID NO: 7698 - DNA, 150 bp, Glycine max
  Clone ID: 701100224H1
ctttttcttcccatttcacccctcgtctttccttgtttccggtgagggccaaccacaacatatgttaaacaaggaacaacctccaaaacataacatcctacgccaaacaaaactttgacctccttcagatctatacccttctctctctct

SEQ ID NO: 7699 - DNA, 238 bp, Glycine max
  Clone ID: 701100225H1
tttcttctttcctctttccactcttggtcttatcttcttcacaatcccacaaccactccttgttataaatcagattttttttttctcttcttacagatccaaacatggccgaagaacaccgatgccaagctcccgaaggtcacagactctgctccaacaactgcggcttcttcggtagccccgccacaatgaatctctgttccaaatgctacagagacatccttttgagggaagaaga

SEQ ID NO: 7700 - DNA, 265 bp, Glycine max
  Clone ID: 701100226H1
caagtcttcagatccttctgttactggtgttgagcttgtgcagctaagaaatggtcaatccacaaatgcagagtcatctgcagaaaataatggccgtgataatattactaaagatccattgctttcaattgatgctcgaccttcccgtacatggaactcaatgcctgcaaactccctaactaatgataacctaggtcttcaacgacatcgctcaggaggagagtggggagatattttagatgtcatctcctcacagaaagaccca

SEQ ID NO: 7701 - DNA, 262 bp, Glycine max
  Clone ID: 701100227H1
ataaaatattgtatttgtattttggtactaatccagttcctcgtgggaaacttgaagatgatgatgatcatccacaacaaacaaaacctctaatttgatttttcggtttcattcgtatgtattgatggacccggagcagacgttcatacgcgtgcaggagaggttttcgcagatgctgactcccaaagtcagagttgctttggagtatctctacctattcatcgccataaccttgttctgcattctcgttgttatgcatgcc

SEQ ID NO: 7702 - DNA, 250 bp, Glycine max
  Clone ID: 701100228H1
cggggttggaaatgagacaatggcttttcctccgaagattctctctgtggtcgatgaagaaggaacctgacttagaatccgcactctcacgcaatcgccgttggatagtcaacaaccaaatcaagaacatcatcctccgctaccccaacaacgaaatccccatccataccctccagaacaagttcaaaaccctagatctccaaggcaaagcccttaactggctctccaagtacccttgctgcttccaaat

SEQ ID NO: 7703 - DNA, 267 bp, Glycine max
  Clone ID: 701100232H1
gcctcagactatcaagattaaccaacctgaccaggcaaccagtggtggtcaacctgcgcaaaagtcggcttgctgtggttcatgaaaagaatcagtatctgtagaaagaggtgcacaggtttctgcaatagcactcatctgggtgctaatgttattctgatgacattataagtgggagcatgtatttgtccctctgtatctcccaactgcagatgtcttattttaaagttaatattttaaattctttgctcactgacttggtggaat

SEQ ID NO: 7704 - DNA, 182 bp, Glycine max
  Clone ID: 701100233H1
atttattcatcagtttttcgttcccttcacaaaactcagaaccctaactatatccatggcatcgggtggaacagaagcttttccagatttgggtaaacactgccagcaccgcgattgcaaccagctcgattttcttcctttcacctgcgacggttgccaacagatcttttgtttggaacaca

SEQ ID NO: 7705 - DNA, 259 bp, Glycine max
  Clone ID: 701100234H1
tctttccctttgacaactgcaatctaaggtagaaataacaaacacaacatgggttctttgggcacaatcaacaagccacatgctgtgtgcataccgtacccagcacaaggccacataaacccaatgctaaaactagcaaaactccttcacttcaaaggctttcacataacctttgtaaacactgagtatcaccacaaacgccttctcaaagcaagaggccctgattcccttaatggcctctcttcatttcgctttgaga

SEQ ID NO: 7706 - DNA, 259 bp, Glycine max
  Clone ID: 701100235H1
ggtagggatcccaatcactgggagaacccttttgagtttaggccagagaggtttatcagagatgggcagaatcaattggatgttaggggacaacattatcattttattccatttgggagtggaagaagaacgtgtcctggtgcttctctagcttggcaggttgttcctgtgaatctggctataattattcaatgtttccaatggaagcttgttggtggcaatggcaaagtggacatggaagaaaagtctggctcactct

SEQ ID NO: 7707 - DNA, 170 bp, Glycine max
  Clone ID: 701100237H1
cttttgatttttggtgacaagtcaattaaaattgctgactttggagttgcccgtattgaggtgcaaactgaaggaatgacacctgagactggaacataccgttggatggctccggagatgatccagcataggccttacacacaaaaagtggatgtatatagctttgggat

SEQ ID NO: 7708 - DNA, 209 bp, Glycine max
  Clone ID: 701100238H1
gagagcgagcagtttcagacacagagagaggggtttgggattggagggattgacgctgcgtctcttcctcttctctttcgatccatccctcattcctaatcctccaatccaaccacctcagcctcacactcacatatacacatatctgaacgcgtatcgtccctcctatggcttcaaagcgcatcctcagggagctcagggatttgcag

SEQ ID NO: 7709 - DNA, 168 bp, Glycine max
  Clone ID: 701100239H1
cacaacccatggccaccacctccgcattcctcctccttcccctcctcctgctgctccacctcgccatcgccgctcacggcatcggcatcaactacggcacgctcggcgacaaccttccaccgcccgcggcggtgccgaacttcctgaagacgaagacgaccatcgacc

SEQ ID NO: 7710 - DNA, 110 bp, Glycine max
  Clone ID: 701100240H1
ccggcttcaacatcttcaagggtgaacaaggaataagccaagctttgtcgctttctgcgtacccttttgaggcaaggagttccattgaggagttgcatgagctttgcaag

SEQ ID NO: 7711 - DNA, 97 bp, Glycine max
  Clone ID: 701100241H1
gggaattgggttctcttcctaaccctggccatcagcctctgtgtctccggcgcattccaaatccaaaccggaaccttgcccctccacacgctccctg

SEQ ID NO: 7712 - DNA, 202 bp, Glycine max
  Clone ID: 701100242H1
ctggttttgggtcttccatgctctttggaacaattgtcggatctctagctgacaaacaaggccggaagagggcttgtgtgacttactgcataacctacattttgagttgcatcaccaagcattctcctcattacaaagtcctgatgttgggccgtattttgggaggtattgccacttcacttctgttttcagcatttgaatc

SEQ ID NO: 7713 - DNA, 261 bp, Glycine max
  Clone ID: 701100243H1
ggaccatccgtatccccatcacagattccaacagcatctgcaccccatgcaccgtataattccagtaaacaagctgtaccttgctttttcttccaaaaaggactttgcctaaaaggtgacagatgtgccttcttgcatggaccacccactcctacttctagcacgggtaataaagtagctgctcaggttccagtgactagccaaggagttgagaatccatgttttaagaagccttttgtcagcaatgaacagtatactcag

SEQ ID NO: 7714 - DNA, 258 bp, Glycine max
  Clone ID: 701100244H1
ctttatgttaagcaatctatggttggccaagcaaaacagatatttgataccttaaagaaaaatggaggtgcaaatgaatttacatttgcaatgatgctatgcttgtataagaagattgaaaggtttgatgaagccattcaaattgcaaaacagataagaaaattgggacccttgacagagttaagttataacaatgtgcttgacctgtatgctactgctgggagacccaaggaagcaatagagacttttaaggaaatg

SEQ ID NO: 7715 - DNA, 254 bp, Glycine max
  Clone ID: 701100245H1
ctgatcacaacctttgtggttgcagcctctgctggtaacttcaaccaagactttgagataacatggggtgatggtcgtgccaaaatcctcaatagtggggaacttctcaccttgtccctagacaagacctctggctctggatttcgttctaggaatgagtacttgtttggaaaaattgacatgcaactaaaactcgtgcctggtaactctgcaggcacagtcacagcttattatctatcttctctgggggatac

SEQ ID NO: 7716 - DNA, 80 bp, Glycine max
  Clone ID: 701100246H1
gctgatttgaatcaaagtgaatatttctccccctccgggttcgattagcgtatcctggtatccctgtgggatttccaggc

SEQ ID NO: 7717 - DNA, 165 bp, Glycine max
  unsure at all n locations
  Clone ID: 701100247H1
cttctacacgccggcggactcgcgaagcacgancggccacgagacacaggctcgtcataacgcaatccgcgtacgttgagaaaatcaagagtttcgcggacagcagcagcgatgtcatggtgatgtgaattgatgatgatttttcttatgaaaacgagggcgttt

SEQ ID NO: 7718 - DNA, 262 bp, Glycine max
  Clone ID: 701100248H1
agacgactctttatggcggctataaccaatttgaacttttcttccttgtgtaaaaaaaggttttgtgtgcgtttgtgcgtgttggagttggctttttgaagtgggtgcatgctgaagttatatgtgtatgtgaaagatgaagaacaatagagataaagaaaagggtaacgacgttgaccagagttacagacagcatcacacgttgtcaatgccaatgatgttttctggtttgaacagagagaaggagatgtcagccatgatc

SEQ ID NO: 7719 - DNA, 189 bp, Glycine max
  Clone ID: 701100249H1
cttgaggccaggcaagccccactcaaccaccacacctctcctcgttcacgctacccctttctgctcttcttctacctttcaagttttaaaagtataaagatggcagagacattcctatttacctcagagtcggtgaacgagggacaccctgacaagctctgggaccaaatctccgatgctgtcctcgac

SEQ ID NO: 7720 - DNA, 261 bp, Glycine max
  Clone ID: 701100251H1
cttcccctcaccgcatcgtcttcctcttcactggatcaatattcatcccgctgtgcttgaattggataatcaaccttaaagctatatgttctgaggttgatgtgttacgtataatcttgttactgttctgagcgtatggaggggtgatacctgattgatctgggatgttgcgtagtaatctattctgattgattatggcatatccggaatgagttcaatggacatatgcttttattaatactgtgaactgtgcgttatact

SEQ ID NO: 7721 - DNA, 204 bp, Glycine max
  Clone ID: 701100252H1
gtcgtcgttgtctttttgggaatacacggtgctcctccttctgcggcccctcttcgccgtagcgttcgttctcttcttaatatccctcggttggtttgtggcgtggaaactggtgctggtgcacgtgccattggtgcaagaggttttcggcctcaagaagaaagctgttcgagtgaagcccccaactggtcgcttttccaaaat

SEQ ID NO: 7722 - DNA, 169 bp, Glycine max
  Clone ID: 701100253H1
catggtgaatgggaagccccaaagattgagaacccaaaatgtgaagcagcccccggttgtggtgagtggaagaggccaatgaagaggaatccagcttacaaaggaaaatggcatgccccactaattgaaaatcctgcttataagggaatttggaagcctcagggcattc

SEQ ID NO: 7723 - DNA, 169 bp, Glycine max
  Clone ID: 701100254H1
cctcgagccgattcggctcgagttgtgctttgttgtaagagacagaacgaggataaaagctgcccccacagtttttcatggacacaagatactcatctcctctctccctgttttccctgccaaagtaacctcgttagtgacaaacaaaaagctctctcacactgagtga

SEQ ID NO: 7724 - DNA, 267 bp, Glycine max
  Clone ID: 701100255H1
aactctctctctcaatctccttaccttgcaagcacgccacccacacactgtccaacgttaaccgatcaaaaacccatctctgtctacctttgtttgatctcaaagttggctctcacaaaaacgtgaaaaaatttcattcccgtgagattctcctccaccgatgcagattgaatttcaggaatcctgggtgtctacgatacaacagtttagatcttttcttctgcaaattttgggcactgcataaggtttggcagtgcccatgatggt

SEQ ID NO: 7725 - DNA, 236 bp, Glycine max
  Clone ID: 701100256H1
ctctctgctcctaggggttctccttcgagttgaccgaaacgatcctccaaccgcgtttgtttatgggacagggaaatggctcccaaaccgccagtacggggctggttggtggacttgaccaaggtgaagttgttaaccaggagggatttgccccaaggctctcagatcgtaagggggaaacaagccagaaggtgcactttgtgaggaacctcataagagaagttgctggttttgca

SEQ ID NO: 7726 - DNA, 244 bp, Glycine max
  Clone ID: 701100258H1
ctcgcaagcaaaaagaaagaatcccaggcgaggagaaagatggaggggaaggagcaggatgtgtcgttgggagcgaacaagttccccgagagacagccgattgggacggcggcgcagagccaagacgacggcaaggactaccaggagccggcgccggcgccgctggttgacccgacggagtttacgtcatggtcgttttacagagcagggatagcagagtttgtggccacttttctgtgtctct

SEQ ID NO: 7727 - DNA, 111 bp, Glycine max
  Clone ID: 701100259H1
gacaacggtagccgcttctcttgatgccaaagaggtgtctacctccagaactgaccagaaccaagtgtgtgactgtgatccccaaactagccatgtcttcaaatcaaaatt

SEQ ID NO: 7728 - DNA, 255 bp, Glycine max
  Clone ID: 701100261H1
ggagaaatagaaagagaggagatgtcgtcgacaaggtgggagaaggaggaggaagaagaagaagaagaggcccaaatggatatctggaagtacatatttgggtttgtggaactggcagtgataaaatgtgcgattgagcttggcatagctgaagccatagagaagcatggaagtcccatgacactatcggagatatcatcaagtttagggtgtgatacttcacatctgaagcgcatcatgaggttcctggtgaaa

SEQ ID NO: 7729 - DNA, 161 bp, Glycine max
  Clone ID: 701100262H1
cgcgcttttgatttgcaacggcttcaaggacgcggagtacatttctcttgccctggttgccaacaaacttgccctcaacaccgtgattgttgtggagcaggaggaggaggttgatttgatcgttgaattgagcaagaagctctgtgttaagcccgtaattg

SEQ ID NO: 7730 - DNA, 209 bp, Glycine max
  Clone ID: 701100263H1
ctgctcgagctcgagccgaatcggctcgaggaaggaacacgtcgtcttctttcaccccgaactacgcatacccggggcggacgcctggtcatcgatgccgcagtcggcctccagaatcgcgggcacaaggtcaccatcttcacatcgcactgcgacccgcaacactgcttcgatgaggcgcgcgacggtaagcctctactacaacacct

SEQ ID NO: 7731 - DNA, 68 bp, Glycine max
  Clone ID: 701100266H1
ctttgccttgattttgtggtcaaataaataaggatgttacactggcctcgctcccattgcttccttcc

SEQ ID NO: 7732 - DNA, 92 bp, Glycine max
  Clone ID: 701100268H1
actttctctctctaaagaatatataaaacaagaacgaaactcatccattgttttccctctctaaaaaaactaggcgcgattaatctcacgcg

SEQ ID NO: 7733 - DNA, 169 bp, Glycine max
  Clone ID: 701100269H1
caaccaaccatcaatggcagatgtaaccacctacctccgccaccaccgcgaccccgaccccgaccccgacgacgacgaccaaaccctaattccattcccttattgggatttggactttgatttcgaccccgaattccccacaaacactttcttcttcaccgacggcgaa

SEQ ID NO: 7734 - DNA, 155 bp, Glycine max
  Clone ID: 701100270H1
gttagatatagcaagagtggttcctgctgttaaccaagtggaattgcacccaggatggcagcagccaaagttgcgcgcattttgtgaatctaaagaaattcatctatctggatattctccactaggttcaccagcagctctcaaaagtcatattc

SEQ ID NO: 7735 - DNA, 264 bp, Glycine max
  Clone ID: 701100271H1
cgaggcgagagaatcggatgcccccggagcaaaggactatgtgcatattcgaattcagcagaggaatgggaagaagagtctgaccacagtgcaagggctgaagaaggagttcagctacgagaagatcctcaaggacctcaagaaggagttctgctgcaacggaaccgtggtgcaggacaaggagcttggcaagatcatccaactccaaggcgaccagcgtaagaacgtctcccacttcctcgttcaggctggccttgtcaggaa

SEQ ID NO: 7736 - DNA, 250 bp, Glycine max
  Clone ID: 701100272H1
ctttcaacaaaaaatcgaatcccattttaattctcaaatccaagcactcgggagacagagaaagagaaagagaatggacgccattgattctgtgttcgatccgctgagagaattcgcaaaggacagcgtgaggctcgtgaagcgctgccacaaacccgatcgcaaagaattctccaaggttgccgtccgtactgcaattggtttcgtcgtgatgggattcgtggttttcttcgtaaagctcatttgcatt

SEQ ID NO: 7737 - DNA, 149 bp, Glycine max
  Clone ID: 701100274H1
attcctcccatttttattccttccttcaatctgctgcttcaatggaaggtttggcttctctcagggttccctttcagaccacccaattccactcttccagacccagaacctctattcttccatcccaagccatttttttccacaaaaga

SEQ ID NO: 7738 - DNA, 258 bp, Glycine max
  Clone ID: 701100275H1
ctattattctcgttttcaatatgcagatcttcgtcaaaaccctaaccggtaaaacgattacgctagaggtcgagtcctccgacacaatcgataacgtgaaagctaaaatccaatacaaggaaggcattccaccggatcagcagcgtttgatcttcgccggtaaacaactcgaagacggcagaactctcgccgattacaatatccagaaagaatcgacgctccaactcgtcctccggcttcgcgggggcatacaaatct

SEQ ID NO: 7739 - DNA, 248 bp, Glycine max
  Clone ID: 701100276H1
gcagtgtcccgatggggagttgcagaagaggaaggaggtcgtgcattgcgttacgcttcatgagattgatgttattaatagcagaacacagggatttctggctcttttcacaggggatacgggtgaaattcgtgctgaggtcagagagcaaattgacaccaaagtggcagagtggagagaagaaggaaaggcagagattgtgcctggtgttcttttcattgatgaggtgcacatgcttgacatagagt

SEQ ID NO: 7740 - DNA, 160 bp, Glycine max
  Clone ID: 701100277H1
gtaaggaccactcgccttctttagtcactggacaacttcttgggttggatgttggcagtgttcttgaagttaccaactgcttcccctttccaatgagggaggaggatgaggaaattgaagctgatggtgccaattatcagcttgaactgatgagatgcct

SEQ ID NO: 7741 - DNA, 216 bp, Glycine max
  Clone ID: 701100278H1
ctttttcctcttttttgaacttggcagtgttgatgagttgcggaagcctttatctaacaaagatgtgtatcagcagtttttaagttcacctgatgaggtcaagattcagaataatgtgaatgatgatctttgcaaggagaatctgcagcttgccgatgaaaatctacgaaaggaacctcgtgttgtggaactcaggaccagtataaaataattggt

SEQ ID NO: 7742 - DNA, 260 bp, Glycine max
  Clone ID: 701100280H1
gtttcgaatagattatcctaagtctttgggaatagtgctgcaatggcttcaagtcaggaggaggtgacccttttgggagctactggaagcccatttgtgtgcagggttcatattgccctcaagttgaagggagttcaatacaaatatgtcgaagaaaatttgaggaacaagagtgaactgcttctcaaatccaacccagttcacaagaaggttccagtgtttattcacaatgagaagcccatagcagagtctcttgtgat

SEQ ID NO: 7743 - DNA, 72 bp, Glycine max
  Clone ID: 701100281H1
cagatgttgggttaaaccagattgccctctttgagggcaaagtggcaggttgtaatggagagcaagtgctta

SEQ ID NO: 7744 - DNA, 257 bp, Glycine max
  Clone ID: 701100283H1
ctggaatccaacctgtcgatattcctgggatccaaaatctcgatgcgacagaacacatcgaaggccattcgtcttatctgtgggctacacaaaagatcttagaccaacttcaattggatacatactatcctgtatataactacatttcttgcatacccatacagtgacctttaatggaggtgttctgtttctctgcttacgttcttctgccagccgttgaagtgggatgaccctattcagaaattatgtatgaaata

SEQ ID NO: 7745 - DNA, 98 bp, Glycine max
  Clone ID: 701100284H1
aagctaccttgctagtgtccatcatcgtatctgttaggatttccaaatatacacattttctatgttattcatagagatctttaacttgaggagcatta

SEQ ID NO: 7746 - DNA, 136 bp, Glycine max
  Clone ID: 701100285H1
gcgcatttctagagggagaaacaaagccagaatcgattttagagagagaaacagcggagggcgcatgcgcgatggttcagatcgcgaggaggaatacgggacggccgtcgaaggcggatctggcgcgccgtctccg

SEQ ID NO: 7747 - DNA, 204 bp, Glycine max
  Clone ID: 701100286H1
cgttccttcacctttcttatattcaggaaagtaagatcatctgcatcgccgacgcttccaacaataacaatggccgataatgcaacaacgcaaggcagcaacaccctattttctccttacaagatggccaaattcaacctctctcatagggtggtgttggctcctatgacaagatgcagagcgttgaactggattccacaggca

SEQ ID NO: 7748 - DNA, 79 bp, Glycine max
  Clone ID: 701100287H1
caaaaaggcaaatttcttgtcttctgaggactttgagcctcctcttatcccttccaagacaatccctgatcctgatgat

SEQ ID NO: 7749 - DNA, 145 bp, Glycine max
  Clone ID: 701100288H1
gtgatttggagtttggagcgactgaactaatcattaatttgcactcgctgtttcagcttcatcacccttcttttgcatcatttatatctcttgagaaatggcacaagaaacctttctattcacatctgaatctgtaaacgagggt

SEQ ID NO: 7750 - DNA, 241 bp, Glycine max
  Clone ID: 701100289H1
cggctcgagcaaaaaaagattaatagaagatgcttttgacaaaaaatagggatgatgaatgcctttcttgttcaatatgttttttgagagaaggaggatgagtgttcatgtattaaccagcttgtaattgcccatgtatgaattttgattgaagaatgatacatatggggtgtgatttctttatgttgtttatacacatgaggtttagttaggaggcatttatcgtagactcgtagttaac

SEQ ID NO: 7751 - DNA, 120 bp, Glycine max
  Clone ID: 701100290H1
cccatatcctctatctttgtagtatgttggtctccgaaatttcatttcctttgtaattagatattgtaagacaataatgtgccagtaactaattctatgcttaatattggtttcgtggct

SEQ ID NO: 7752 - DNA, 253 bp, Glycine max
  Clone ID: 701100291H1
atggttcaaatagttccatcaaacactaatttggacaatgaagccacagctaaaatcacgaatgaaaaagatgaccctgaaaatgccatgctcccctgacaggtctagccaagaagttgttaaatctgctgaagtggagcatgataaagaggaaatgggggcacagataaaagagattctatcggttggtcctactgaagaagatttcaagtagcatatagcatattttctcgagcattgtcatacccgggtt

SEQ ID NO: 7753 - DNA, 219 bp, Glycine max
  Clone ID: 701100292H1
caagtctggtgcttcgatgaagtgtgctggttgtcaaggaactggtatgaaggtttctataagacatcttggcgcatccatgattcagcagatgcagcatgcctgcaatgaatgtaagggtactggagaaactatcaatgacagagatcgctgcccacagtgcaatggagagaatgttgtgcaggagaagaaagtccttgaagttattgtagaaaaggg

SEQ ID NO: 7754 - DNA, 234 bp, Glycine max
  Clone ID: 701100293H1
cgaaatttctgcagaggattgcttacctcaatgttggaatctatccattcacttccatcttccttattgtgtattgcttcgttcctgctctttcacttttcactggccagttcattgttcaaacccttgaagtcaccttcctagtttacctcttgggcataaccttgacccttgtcatcctcgctgctttggaaatcaagtggtctggcattgagcttgaagagtggtggagga

SEQ ID NO: 7755 - DNA, 78 bp, Glycine max
  Clone ID: 701100294H1
ctcaattccaacaacaccacaatgggaagaagaccggcgaggtgttaccggcagataaaggacaaaccgtacccgaaa

SEQ ID NO: 7756 - DNA, 261 bp, Glycine max
  Clone ID: 701100296H1
cacaaacccaatgtggatctctcagcaagaaaactcttcaagttggttcttcctcccagttgttaccttcatcatcccttttcttttacgtactttcctcaatcttttatccaaccggaacaatgattccaaaaaaccctcaccaccatctcctccaaagcttccaataataggcaacctccatcaacttggtacccacattcaccgcagtcttcaatccttagctcaaacctatggttctttaatgctacgtcacttagg

SEQ ID NO: 7757 - DNA, 215 bp, Glycine max
  Clone ID: 701100301H1
atgaatttcacaccaaacctacttatcaccaaaattacagcacctggacaccctgccattttaactctcacaaggtgcagcagtgccaaatgagtgcttttgagagccattactatccttatcctggtgagaatccacttcagtagcttccaattaatatggttgctcagggttacccccgttagcaatatccagggattttcagtattttgtgg

SEQ ID NO: 7758 - DNA, 275 bp, Glycine max
  Clone ID: 701100302H1
cttccttctcatcattctcatattattgtcgccacttcgagctcaatcagcctcgcgccctcgctcttcccttcctggtggcgacaatgtcggctcctgctaggaataggatgattagagacttcaacaggctgcaacaagatacgtttgccgggatcagcggtgcaccccaccataagcacatcatgtacgaggtctgctggcatatttggtgctgatgagaatccctgggatggaggccgttcattttgattgcccagtttactgaggattat

SEQ ID NO: 7759 - DNA, 274 bp, Glycine max
  Clone ID: 701100303H1
cctcctcgttcttcttcttccgccctttctctctctagaaccgtacggtcgtttcttcctctctcctcaaccggagacagcgtcgccttcttttctgaatctcgcggtgttgttagttctgcggcggttgtagttccggcggcgatgggacagcaatcgttgatctacagcttcgtcgctcgcggcaccgtgatcctagcggagtacaccgagttcaccggaaacttcaccagcgtggcggcgcagtgcctccagaaactcccttccttccaac

SEQ ID NO: 7760 - DNA, 273 bp, Glycine max
  Clone ID: 701100304H1
aagacataagggaacttttctctgagcttggagagttgaagcgttttgctgttcattatgacaaaaatggacatccaagtggttcagctgaagtcgtttatactagaagaagtgatgcatttgctgctcttaaacgatataataatgtacttttggatggaaagcccatgaagattgagattgttggttccaattcagaattgcctataagtgctcgggtgaatgtcactggggtgaatgggcgcaggaagaggactgttgtaatgacgctag

SEQ ID NO: 7761 - DNA, 273 bp, Glycine max
  Clone ID: 701100306H1
gggtatttgactcgtgcgtttggtcgagatctgaactgaaaccgctgctccgatctgaggccatggctgggtctgggagttccatgctgtattcctttcttctcttcacagtcattctctcacttcaagaaatgtaccgagggaaactagcatcatcagaattatcacactatacttggagggtttgttagctctatcctatttcttgtgctcctaaccttcattggaaatttgcaggaaacaattggtgcaagaactggttggggagctgtc

SEQ ID NO: 7762 - DNA, 272 bp, Glycine max
  Clone ID: 701100307H1
tttgaaccaatgacaatgcttcagaaaatggctgagcttatggagtactcttacctgttagatatggcggacaagactgaggatccatacatgagactagtatatgcttcatcattctttatatctgtctactatgcctatcaacgaacgtggaagccattcaatccaattcttggtgagacttatgaaatggttaaccatggtggcattacatttatatcagagcaggtcagtcatcaccctccaatgagtgctgggcatgctgaaactga

SEQ ID NO: 7763 - DNA, 271 bp, Glycine max
  Clone ID: 701100308H1
aggacatgcgtcaaactgtggctttcggagtcatcaacagtgttgagaagaaagaccccaccggagctaagttcaccaaggccgctgccaagaagatgtgattgcatatggccaatttgtgtagcacatgtgatcatcatcgtggttactcctttatagtagtattatccttggagagtcttaggtggcatgtgtacgtgatatgtttaagattctgacgatttcactgaagccgaaacttgcagaactaggttcttgatcggcggtggtc

SEQ ID NO: 7764 - DNA, 273 bp, Glycine max
  unsure at all n locations
  Clone ID: 701100309H1
aaaattaatcatcttacttatttattctccgaaaatggttgatttacattggaaatcaaagatgccaagttcctacatgccttccaaaactctaaaactctctctctccgacaacaagtccttaccctctttgcaactacccttccgcaccacagatatctctcacgccgcaccttctgtatgccgcacttacgactantatctccgccttcctcaactcagttagctttggtactcctcagattttcctaattggtacaacgaaccaatctt

SEQ ID NO: 7765 - DNA, 273 bp, Glycine max
  Clone ID: 701100310H1
aataggagccctgaaattattatggctccacttcttcctcctgagaattgtatgtcaaagctcattactcgatcagatgatactgaatcagtggtcaaagaaaggcttcgaatatacaatgaaatgactcagcctgtggaggaattttaccgttcgagaggaaaattattggagtttaacctgcctggaggaatcccggaatcttggcctaagttgctacacgctcttaatcttgatgattacgaggacaaacgatctgctgcagcataaaga

SEQ ID NO: 7766 - DNA, 270 bp, Glycine max
  Clone ID: 701100312H1
gtcaccacagacattgaatctttgatgagtgccaatattggtagttctcatgttttcgagcgtgattcacatcctagtcctggaagaattgtagatagaccaggtgggatgtctcggatggatcgccgtggggatgtggtaatggaggatgacagatggagtagagtttctggtgcttttcgttctggacgtggtttggatggcattggaggtaatgtgggattccgatctggccaaggaggcaattttggtgtcttaaggaaccctcgt

SEQ ID NO: 7767 - DNA, 274 bp, Glycine max
  Clone ID: 701100314H1
cagagagagagagagagagagaagggtttgagagagatggggaggaggatactgaatgatgccttgaggagtatggtgaatgcagagaggagagggaaatctatggtggaactcaagccaatctccactgttatgtcttcctttctccaaatcatgaaacaccacgggtatatcaaggactttcaagtctatgatccgcatagagtggggaggatatcggttgaactacaaggtaggattaatgattgcaaggcccttatgcacagaaaggacc

SEQ ID NO: 7768 - DNA, 275 bp, Glycine max
  Clone ID: 701100315H1
catgtcttcagtgttttccaaagtcacactgaatagttctttttctgaacaggctggtgataatttgcctgattactctggttgtgaagtggaggaatctgagtttttttctcaggctcagccatgcaattcttcaaaaataaaggctgcacttgaggtgttgcagttgttgtctaaaccacaatgctgtgcttcccaaaacaattctgtgcagagcacttctggggaaagtactgatggccttggtagttcatctagtgctgacagaatgaaat

SEQ ID NO: 7769 - DNA, 282 bp, Glycine max
  Clone ID: 701100316H1
atcaacggctctgaggtcgttaaggccatcaagagaaagatcaatcacaagagccccgtcgttcagaccctcagccttgacctcctcgaagcctgcgccatgaattgcgacaaggtcttctccgaaatcgcttccgagaaggttctcgatgagatcattcgcctcatcgataacccgcaggcccatcaccagacccgcagccgggcttttcagttgattcgggcctggggcgagtccgaggatctcgcttatcttcccgtctttcgtcaaacttatatgagt

SEQ ID NO: 7770 - DNA, 274 bp, Glycine max
  Clone ID: 701100317H1
agcgatgagcgtggcagcggagaagatagcgacggcggcgcgacgccaagccgtgtcgctaacggacgccgccgcctcgcgaatacggcagctgctacagcagcgtcagaggcccttcttgaagctgggagtcaaggctcgaggctgcaacggcttatcatacaccctcaattacgcagatgaaaaagggaagtttgatgagttggttgaggataagggtgttaagatattgattgatccaaaggcgcttatgcatgtcattggaactacaatg

SEQ ID NO: 7771 - DNA, 275 bp, Glycine max
  Clone ID: 701100318H1
caaaggcacactcgcactcgagacaatcacgttcggaagaaccctaatccgaaacgtggccatcgggtgcggccaccacaaccagggaatgttcgttggcgccgccgggctttcgggcctcggaggtgggcccatgtccttcgtgggccaactcggaggtcagaccggcggtgcctttagttattgtttggtcagcaggggaatcgagtcgtccggattactcgaattcggacgagaagcaatgcccgtacgcgctgcatgggttcccctgatcc

SEQ ID NO: 7772 - DNA, 269 bp, Glycine max
  Clone ID: 701100321H1
gtcagttacataaactacgaaaatcatgaaattgtgttgaatgacccggaaaattgccttccgcacaagtttactgttcgcaacgattctcttattcatccttacaaatttgacgatgaagctaaaacaagtaagtcgatcttcttcaactgttcttcagttgagcatcatcacctgatatactaccagcagtcactgtcagactcacaagacatgatctcctgtccgatttatgtttctgatcttgatgacagtgtgctcagtttgga

SEQ ID NO: 7773 - DNA, 233 bp, Glycine max
  Clone ID: 701100322H1
aaaggctagaacctgcccctttttttttggcaatatctttcttttttatttatttatattattggtttctcacgtgtaatttgcgtatcaatgcttcactgcattaagtcaaagtccgagaagcagttgcacttacacataatcattgtatttttgtgtccattgcccaccaccatgcctgtattgtgattttagatcactaattttcgagaccttgtattattcgtgttatc

SEQ ID NO: 7774 - DNA, 270 bp, Glycine max
  Clone ID: 701100323H1
cggcgacttctcgatattattttttctgacagagccaccgacagagccggcggttcccgtggcggtttgagaatggccgacaagtacaacctgaagaaccccgccgtgaagcggatcctccaggaggttaaggagatgcagtccaacccttccgacgatttcatgagcctccctctcgaggaaaatatatttgagtggcaatttgcgattagagggcctcgtgatacggaatttgagggtggtatttatcatggaaggatccagttgcct

SEQ ID NO: 7775 - DNA, 271 bp, Glycine max
  Clone ID: 701100324H1
cacacacacttgcgagatctaattgttccagagaaccaacaatcaggggatggcggacgatgacaaagcggttggggaaggtgagatgaaagagacgacgggtggtaccagtccttctgggagtggaaagaagaagaacaaaggtttcttgttgcgtatttggaacgggatatttaggttacacggcgatgattttgagaagagactccagtacatttctaaagaggaagctcaagtcatgactagaatgaacaggagatcccgatcctgg

SEQ ID NO: 7776 - DNA, 268 bp, Glycine max
  Clone ID: 701100325H1
gttccaaaatatttgactcaaacaacaaggtgtttgacgacgtcctcccaggaccttgtcggaacgagtgcccgtgtgggccccagtcaaattcagccaaactatgtaatccacctggaggagtcatttgtcaaccctgttcccccagagtggttcaatctccctcgcctccatcgaaccaaagtggtggttggagcagccaaatggtggcgtttctggtggttggttgtgtgggatgcagttctctattgctagtcacggccttctt

SEQ ID NO: 7777 - DNA, 272 bp, Glycine max
  Clone ID: 701100326H1
cctcgagccgattcggctcgaggaaacactctctctctctcttctacctcttcttcttcttacacacgtattgttctaatccacaaaaataatggccttaaattacaacattgccctcgccttctctacggttctcacgctgcttctccttcccttaccaacccttggggagctcgtgcaggagcagccactagtcctcaagtaccacaacggccaactcctgaaggggcgcatcaccgtcaatctcatctggtacggcaccttcaccccga

SEQ ID NO: 7778 - DNA, 272 bp, Glycine max
  Clone ID: 701100327H1
actcgagccgattcggctcgaggaaaaacacagaatcgcgtttgcgacctgaggaatgagtacactgcagggtatcgttgatcccttcaactccatcttcatacccgataacaacaattatcacgacaccaattctacttcttcttcttcttcctcaacgaatcgaatgaaagcttctcctcctccacctcctcttcctccttcggtttcgaacgagcgcgttgcctacaagctcaaaggctacttcgatttggcgacgcaggagatcgcga

SEQ ID NO: 7779 - DNA, 262 bp, Glycine max
  Clone ID: 701100328H1
catcgtgaatgcgtataaaaggaaaataaagacattagcgtcaaaatgttgggtgtgttcagcagctccatactctcgctgcccatgacgctcgtggcgccggccccgtagtacgtcgccgaagatgacggcggcggcgctgcggaagcggttcgaggagaagaacccctccgccgtgtcggtggaggtcggagaccatgtccagctcgcttatacccactacaacgagtcaaatattcagcacaggtaaactaattgacat

SEQ ID NO: 7780 - DNA, 269 bp, Glycine max
  Clone ID: 701100329H1
cgagccgctcgagccgcgccagaatccgttgagaatggcgttgccggtagtcgtcgatccagagtaactcaaggaggtcgacaaggctcgccgcgatctccgcgcactcatcgctaacaggaactgcgctcctctcatgctccgattagcctggcacgatgccggaacttacgatgctaagaccaagaccggtggacctaacggttcgatccggaacgaggaagagtattctcacggagccaataatggcttgaagaaagctattgatt

SEQ ID NO: 7781 - DNA, 273 bp, Glycine max
  Clone ID: 701100330H1
cttattttctctctcttggattccattcctgcgtcttcatcagagccaatggaagccgcggcgacggcaacggcaacagttctcgcaccaccgtcggctttcctcggaagaccctccgtactcgccttccgttccaatcttcgcttctccactaagttaagcacttctgtagctatctccaagcatggtcatgggagacactgtgttggaactagaaggggttttgtagttagagctgcatcatttacaccagagtcatccgaaccgagttcc

SEQ ID NO: 7782 - DNA, 276 bp, Glycine max
  Clone ID: 701100331H1
cgattttctgatgggtggagtatccgctgctgtatcgaagacagctgctgctccaattgaacgagtcaaattgcttatccaaaatcaggatgaaatgataaaaagtggtcggctatctgagccatacaagggaattggtgattgtcttgctcgaacaatgaaggatgagggtgtgattgctctttggagaggaaatactgctaatgttatcagatatttccctactcaggctctgaactttgcctttaaggattactttaagaggcttttcaactt

SEQ ID NO: 7783 - DNA, 283 bp, Glycine max
  Clone ID: 701100332H1
cagaaacacaaaatggctgagcagaggcaaaacaacgtccacgttcttgttctgccataccctgcccaaggccacatcaaccccctcctccaattcgcaaaaagattagcttcaaagggcgttaaagccacagttgccaccactcactacactgccaactccatcaatgcacccaacatcacgattcatgccatcttcgatggcttcgaccaagcgggcttcgcccaaacaaacaacaacatgcagctcatcctggcctccttcagaacaaacggttccagga

SEQ ID NO: 7784 - DNA, 273 bp, Glycine max
  Clone ID: 701100333H1
agtcacttccttttccatggcccaaacactttctccctccatttattacctaccactgtcactatgaatgctctcttttgtttttcaccttcttttttttttttgggcgttcatcttcaacttcatcctaaccttttagacatcatattttcggcttagagcaaccaaaagcaagttcagattgccttgtctttcggggtagtggctgtagaggaaacactcctgttttgtgcgaatattgatattggaatagtctttctctgaaccccattt

SEQ ID NO: 7785 - DNA, 272 bp, Glycine max
  Clone ID: 701100334H1
catccagtcaatagacaaacaatatctttctctctctgtttggtttggcctcttgctgtaagaagccagccacactattacgcttccgtggaaccatcgatcccactcaatgggcctttgcaagttccacaccggttgagcttcgtgtcaggtggcttagtgttatccttaattattcttgtgacatactagtttgtatgatcatattttctcggattgtttaggaggtctagtttaattgacttgaccaggatggatgaattattataaat

SEQ ID NO: 7786 - DNA, 270 bp, Glycine max
  Clone ID: 701100336H1
gagttccagagagagaccctcttgcacaattgagcttgcctcctggatttagattttatcccactgatgaggagcttttggttcagtacctttgccgcaaggttgctggccatcatttctctcttccaatcattgctgaagttgatttgtacaagtttgatccatgggttcttccaggtaaggcagcgtttggagagaaggagtggtacttcttcagtccaagagacaggaagtacccgaatggttcacgaccaaacagagttgcgggtt

SEQ ID NO: 7787 - DNA, 90 bp, Glycine max
  Clone ID: 701100338H1
cgtaaatgaagggaattcttgagacgaatatacaacacattactgcatagatatagtagccgggagtcgctgacagattctttctggcgc

SEQ ID NO: 7788 - DNA, 266 bp, Glycine max
  Clone ID: 701100339H1
acgaaatcgcgaacagaacagcaacgttaacaatgggttctcgctacgaggtggaactgaagctctcatcggcacgcgctctcaagaacgtgaactggcgccatggcccgaaccgcccatacgtcgtcgtttgggtcgacccaagcaacaagctctcgacgcgcgtggacgaaagcggcgacactgacgcgaattgggaccaaacgctcacaattccgttgccaccaaagcctctcgaggatcaaacgttgtacatcgacgtggtc

SEQ ID NO: 7789 - DNA, 268 bp, Glycine max
  Clone ID: 701100340H1
ctttcttgtacttgtttccaactcactcatctcagcttttggcttctgtggatctgtgcaaagactcaatgaaagatactcccaccgattgtgtggttcctataactcctgaggctgtcattgagaatggggatttgcaatcccaatcccctctcacactctcagtggtcaggaaacaactcaaacgtgcctgcattgattgcgattctgaccgtatctctgttgataataataatgacaatggcagcccccgaactcctaaggatgg

SEQ ID NO: 7790 - DNA, 266 bp, Glycine max
  Clone ID: 701100341H1
cttttgatttttggtgacaagtcaattaaaattgctgactttggacgttgcccgtattgaggtgcaaactgaaggaatgacacctgagactggaacataccgttggaccgctccggagatgatccagcataggccttacacacaaaaagtggatgtatatagctttgggattgttctatgggaactcatcactggtatgcttccatttcagaacatgacagcagtacaggccgcatttgcagttgtcaacagaaatgttcgcccaa

SEQ ID NO: 7791 - DNA, 263 bp, Glycine max
  unsure at all n locations
  Clone ID: 701100343H1
cgctgttctttcaaatcgtaaccgaagaatgaagatggtgcgctgctgtcggtgcttcgcctgagtctcattccgtttgcgcccactatcacaggttgtgctgaggcttaactggttcttgaagcatatttcagagttttatcagagaacaaatgggttatattgggactcaccctgntgcagctctgcacagatataaatatagtggagtagatcattcctatgtggccaaatatgtactacaacccttttggagtcgcttg

SEQ ID NO: 7792 - DNA, 269 bp, Glycine max
  Clone ID: 701100346H1
caagcgccaatggccaagggtcgcaaattccccaccacgaccggaaccgagcgcttcttgggattgggaatgggaacaacaacaacaacctactcctcccagggctccgccgccgccgaccggtcggagttctgggaagaggacgtgtggtccacggcggaacaccgtgacggagatgtgaatgcctgccccggcgagtgggaggcatgcgcgccgccgcggcgtcggaacaacagggagaactgcaacgtggggggtttgtcgctggc

SEQ ID NO: 7793 - DNA, 271 bp, Glycine max
  Clone ID: 701100347H1
cgaaatgcagctgttgttttccaaaagtgcgacttggtggcccgaaagcccatggataaacagaacaacatggtcactgcccaaggacgagaagatccaaaccagaacacaggaacttcaattcaacaatgtaacctaacaccaagttcggatcttaagcctgtcgtgggctccatcaaaacttttctagggcgcccatggaagaagtactccagaactgttgtgatgcagtcgacattggacagccacattgacccaacaggatgggctg

SEQ ID NO: 7794 - DNA, 268 bp, Glycine max
  Clone ID: 701100349H1
ctgacaatgcaaggtggttcattggtttcagggtataacaggggtgatccagagttgagagaaatagtttcagctttgacacacgtggtgtcttcagggtctggccagaggagcaccgaatggacccagcaaagtggttttcctatgatgtctgcttcttctctttcacgtttgtctgctttctcttcttcttctccttctccttcttctggagcctcttgggttggccacaaaagaggcagagaagaagaagagaatagtacttcac

SEQ ID NO: 7795 - DNA, 264 bp, Glycine max
  Clone ID: 701100350H1
ctaccataaatgctatagctgttgaagcttacaaaaagtatataacggtttctctcattcgtcatggacagttctcaaccagtcttcctaagtattcttcttcgactgctcaaaggaacctgaagaacttttgtcagccttacgtcgaattggctaatagttatggcactggacaaattgaagaactagaggcatatgccagggcaaatgcagagaagtttgaatctgacaacaaccttggactggttaatcaggttgtatcat

SEQ ID NO: 7796 - DNA, 267 bp, Glycine max
  Clone ID: 701100351H1
ctcatatccttatcctgtttctttcaatggaagtcatttctgcttctagcttgaatcccaacgctccgatgttcgtaccactcgcctatcggacggtggaggatttctccgaccagtggtgggacctcgttcactcctccccctggttccgcgactactggctccgcgagtgcttccaagatccccagttccaaaacgacgacgctttcgacttcgactttgacctagatctccaagatgaagatgaaagggaacgaaaggaaggga

SEQ ID NO: 7797 - DNA, 261 bp, Glycine max
  Clone ID: 701100353H1
tggggttcaacacgcggaacgaccttctctcgcggttcacgggatccataaacgacgacgtttatttaagagacattgtggtgagttttctcttagcgggccgtgacaccatcgcctccgggttaatcggcttttttatgttgttgtctaaaagcccggaggtggaggagttgattacagaggaggcgggccgggtggtgggcccgggccaggagtttccttcgtttgaacaaatccgcgaaatgcattacctgaacgcgg

SEQ ID NO: 7798 - DNA, 265 bp, Glycine max
  Clone ID: 701100354H1
cgcatccgttgcctgaaaaattgttcagaagcttggacactgtaactcgtatgttaagattcacagcaccttttccacttcttgcatttcctgtgtacctttttagtaggagtcctgggaagactggttctcactttgaccccagcagtgacttgttcgttcccaatgaaagaaaagatgttattacttccacagcttgttgggctgctatgttgggattgcttgttggattggggtttgtaatgggtccaattcaacttcttaa

SEQ ID NO: 7799 - DNA, 265 bp, Glycine max
  Clone ID: 701100355H1
cctatactctatttttcgcgtcacataaacaaaaaaaataaactggggagaagcatgttgttgatgttgggactatgcttcctattgttctctgcatttccacttgcgttctctgagagatgccacccacaagacaagaaagcgttgctccaactccagaaggacctcggcaacccttatcacatcatatcctggaacgcaaaggaggattgctgcgagtggttctgctgcgttaagtgtgacgagaaaacaaaccgcgtcatta

SEQ ID NO: 7800 - DNA, 260 bp, Glycine max
  Clone ID: 701100356H1
ctttcttccaacctctcaagtccaaactacccctttttcttctcccaccaacttcaccgtcctcttcctcgatcatgtctcacttcaagggcaagtaccatgatgagcttattgccaatgctgcttacattggcactcctggaaagggtattcttgctgctgatgagtcaacagggacaattggcaagcgtttggccagcatcagtgtagagaatgttgaatccaacaggcgtgctcttagggagctgcttttcaccgct

SEQ ID NO: 7801 - DNA, 262 bp, Glycine max
  Clone ID: 701100357H1
cgcagattctctctttcgccgccgttgcagtggcagtggcagtggcacgtcctctcacgagtcaccctttttctcaagggttactcgtgctatcatggagtttgttgcttgtgctaaccctgataataatgatgagatatctgattctgaaacacaacccaataagtggatgagaaagaagtctatggtgtgggactacttcacagtggaaacggttggagctggatgtaccagggcctactgtaaacagtgcaaaaaatca

SEQ ID NO: 7802 - DNA, 261 bp, Glycine max
  Clone ID: 701100358H1
cgagcagcagcactgaggatgagacagaaagctatgtcagtagcaacaacttgttgagatttgaaatcccagatatgctacgtatgaatacattaattatatgagtactcattcatacgtagcatataattaatgtattcacatcatgaaacaattgtgtcgaacaaaaattgatttatctggggctagctagctagctagctagataattacaatggatcgattgtgttcatacttgtaacattttctaaatttttaata

SEQ ID NO: 7803 - DNA, 262 bp, Glycine max
  Clone ID: 701100359H1
cagatattgaacgctacacatcaaaaataaatcgagccaacgcatttaattgtaagtgtcttcatattacctgtgttctgtcacatctttttgcataatattggcactaagtcttttttgatagaaattgtgaagatgtactgttatcattgtatcaactatattgtgcccttctttttttatttgatttggcaaacacggctacttttctccaaataagatggatcatttgtattgccggctttgtgcacaattatctact

SEQ ID NO: 7804 - DNA, 265 bp, Glycine max
  Clone ID: 701100360H1
actcgagccgaatcggctcgagcatctgcatatctttctgcaagtaccagttctaacgtacacccacttgttattgctgcaactcctcaagaaccaaaccagtttgctgtaggactgtcggatggcggagttcatgtctttgagccccatgagtctgaaggaaaatggggtgtgcctccacccattgagaatgggtcaacgagcaatatggcagctacttcagttggagcttcttcagatgaagctcagagatgatccatgtcag

SEQ ID NO: 7805 - DNA, 264 bp, Glycine max
  Clone ID: 701100361H1
ctgtactttatccctttctgtgagggaattatggtaattgatatcgaggttttgactcatggattctgatcgccccagaaaaccttccaaaaatttagttcactctcgcttcttccttttcggcttctattgctgggattgggagttcttaaccgctctcctcctttttagttgttccccttaatcttgttccttcatattttttttttttcttattagatcagattgaacaaaagggttgctctttattttttaatcttgggg

SEQ ID NO: 7806 - DNA, 266 bp, Glycine max
  Clone ID: 701100362H1
cttttgagtcttccaagttttcaccatcgtaatgggttccgaaggatccagcgtcgtggttcctaggaatttcagattattggaagagcttgagagaggtgagaagggaattggggatggaactgttagctatggaatggatgatgctgatgacatatacatgcaatcttggactgggactatcatcggtccccctagtactgttcatgaagggcgtatctaccagttgaaattgttttgcagcagggattatccagacaatcctc

SEQ ID NO: 7807 - DNA, 269 bp, Glycine max
  Clone ID: 701100363H1
ccataagaagacagatgaaataaacagattaaatggactttacaagcggatgttatccaattggggggttaaattatttgaaggtgagggaaagatagttggtccaaatgaagttgaggtgacacaattggatggcactaaactgtcctactcagcaaagcacatattgattgcaactggcggtagagctcaacgtccaaatattccaggacaggagttgggtataacatcagatgaggcgctaagtttagacgatcttcctaaacgtg

SEQ ID NO: 7808 - DNA, 281 bp, Glycine max
  Clone ID: 701100364H1
agtcgcacttgatggcatactataccgcaatgttagatctgtgaattacaccaggggaagtttcatctttcccggtgctcagccctatccccatcgcaacttttctgaggaagttgctattcttgatggctagtttggcaagcttagtgcaggaagcaatgcttatattttgggtactcaagaccaatcacagaactggcatgtctactctgcttctgcagattctgcaactccatgcgacaatgtttacactctagacatgtgaatgactgggctggata

SEQ ID NO: 7809 - DNA, 269 bp, Glycine max
  Clone ID: 701100365H1
tcaatcctagaactcaacctggcttcagcaaaggatctcaaagacttgaatatattctcaaagatggatgtatatgctgcgctttcactctccggcgatcaaaagaccaagactcccgtccacagaaacggcggcaccaacccaacatggaattttccggtcaagttcacttttgatgaatcggtggcgcggcagaaccgtttggccctcgaaatcaagatccgctccgagcgcgccctcgccaccgataaggacatcggccaggtcca

SEQ ID NO: 7810 - DNA, 262 bp, Glycine max
  unsure at all n locations
  Clone ID: 701100366H1
cgggattcggcgtccagatcacagatcccgttcaattttttctccgcatcccccgatcgggtttggattctgaagaaagttcaattccgcacaacttcgggtggcgagntgntgtngaggctcgngttggggatgggcaagattgtgagaggaagggggaggccgttctcgaattgttcgtcgtcgtcggcgtctccgttgtcggcgccgcgggaacgcagtcgtcgacgtcgttgacggacacggtgaggcggtcgcaggg

SEQ ID NO: 7811 - DNA, 264 bp, Glycine max
  Clone ID: 701100367H1
agaaatctggacaattttcctaaacggttgaaccagagtttcagtatgagcagatttaggaaatagaaaaattggctcctttcccccttagtttcagaaggaattgattgctcgacgactgttaattttgtaaggcacgggttcaagagatggagaaagagtcatttattcgaagcaataacaatacgaacataatgtctagtgttagagagaaaaacggaggggatgggtcgttgttgttgagggcgagttccgatagcgcta

SEQ ID NO: 7812 - DNA, 217 bp, Glycine max
  Clone ID: 701100368H1
tctctgaccttctttcttctcccagctccaatcaccacaatctcggaggcttcgaaagacctcatcatgagtcctactcgtcggatcaaacaggttcttcaggcggtgtgccaaaattcaagtccacaccccctccttctctccctcttagccataatcatcctcaaacaccaatattttctccttcttcttactttaacatccctcatgggttaag

SEQ ID NO: 7813 - DNA, 257 bp, Glycine max
  Clone ID: 701100369H1
cacgcgccaagcctccttcgccgccgccgacaagagtctcgctcattctcccaggctttccatgcattcttcccactccaacccccgcagattctcgtcggagcgcgacggcgagaatttcggcgttcgccgggatctgaaccgaaccggatcgcgctcgttcccgccgatcgtgcctcacgaagaggaattcctctccgacgccgctccgcgcaagctcggaatccggccggaggatctacgattcggaggtggag

SEQ ID NO: 7814 - DNA, 261 bp, Glycine max
  Clone ID: 701100370H1
cgaattcaaggatgaaggagcaagcttatgaacaatcaccaacactcttcttgtcagatattcaacaggtttggagaaagcttcaagacgctggtaatgagattgttgctcttgccaagagcctctctaacatgtcaagaacttcctactctgagctggtgggaattccagcacagagcacatttcaagatgagaagcaagtcgaatttgactgttgcatgaaaccagaacagacacaagcatgtgctatgtacaaaattt

SEQ ID NO: 7815 - DNA, 263 bp, Glycine max
  Clone ID: 701100371H1
cctatgaacactcattatcctcttctctaacaaagccatagtacgacacttttagttcattagttcttcttatcctatggataccattcgtaccaccaccatcacccgcgtgcaacaaacaaccccaacaaagacaaccaagcccaagaagaagaactcaccccacccagtgaaggtagtctacatatccaaccccatgaagatcaagaccagcgcctccgagtttagggctttggtgcaagagctcaccggccaggacgccg

SEQ ID NO: 7816 - DNA, 241 bp, Glycine max
  Clone ID: 701100372H1
cagaaagagagtgaataaatccagcattgttctgttctctgcaacattctccactctcaaccatggcttcaaagcttttactcatcagtgtcttcgtatttgatttgagtgctcattggactatgccgaggctgatagagcagacaagaatcacagctcagtgttgtcacggaccatgtcaagcgttacaattactgtgtctataactctggtatagcaactggctatggtagtggagcat

SEQ ID NO: 7817 - DNA, 91 bp, Glycine max
  Clone ID: 701100373H1
ctaatttctcgaaaggtagggttttgcagagcctcgtcctcctctcacggtttcttctttttatcttctcacctttcttcttccactgatc

SEQ ID NO: 7818 - DNA, 257 bp, Glycine max
  Clone ID: 701100374H1
cttgaaggtcattgctgagaatatgtctgcagaagagatccaaggcttgaaggcaatgtttacaaatatggacactgacaagagtggtacaatcacctatgaagaacttaagtcaggattgcatagacttggctcaaagcttacagaggctgaagtgaagcaacttatggaagctgctgatgtagatggaaatggctcaattgactacatagaattcatcactgctacaatgcatagacacaaattagaaagagatg

SEQ ID NO: 7819 - DNA, 258 bp, Glycine max
  Clone ID: 701100375H1
gttaattgttaaatcatggtaggtatagaaagaaaactcaatttggcttcttacaattgcaggctgttttgtgggatcgatgacatatattgtctcttcttggggagcttgaacaacttgtccctactcaacaagcaatatggattgtcaaagagtactgatgaggccatgtttgttattgaagcttacaagacactccgtgaccggggtccataccctgcagatcaagttgtcaaggagcttgatggcagttttgcc

SEQ ID NO: 7820 - DNA, 259 bp, Glycine max
  Clone ID: 701100376H1
catgagcctcttcggtataggcagaaaccagagaacattccgcccgaaaaaaagtactccttctggaagtaagggagctcaacttagagaacatattgatgccacgttgggtagtggaaatctgagggaagcagtaaagctacctcctggggaggatttaaatgagtggctagctgtcaacactgttgatttcttcaaccaggtgaatctgctttatggtacccttacagagttctgtactcctgagaattgtcggacg

SEQ ID NO: 7821 - DNA, 261 bp, Glycine max
  Clone ID: 701100377H1
aatatattccattctctctgtgtatgtcgctacctctcgcttcaagatgcagatcttcgtcaaaacctcaccggcaagaccatcacccttgaggtggaaagctctgaaaccatcgacaacgtcaaggccaagatccaggacaaggaaggaatccccccggaccagcaacgtctcattttcgccggaaagcaacttgaggacggccgtacccttgctgactacaacattcagaaggagagtactcttcacctcgtcctccgt

SEQ ID NO: 7822 - DNA, 261 bp, Glycine max
  Clone ID: 701100378H1
cctcgagccgaatcggctcgaggcaattttcatttttctctctcccctagtcaaagggattcaccgttcttcttcccaggttatttagaaaagcaaaatggtgaagatttgctgcattggtgctggatatgtggggggtcctactatggcagtcattgcacttaagtgcccatccattgaagtcgctgttgttgatatctctaaatcccgcattgcagcctggaacagcgaccagcttcctatctatgaacctggccttga

SEQ ID NO: 7823 - DNA, 266 bp, Glycine max
  Clone ID: 701100379H1
agaaccgcagcttcagcccaagctggagcccgcgccagagcttgtgagcgctggcgctgaggattccgagaagtcgcatgtcagtgatgtcacggaggttcgccacgttgccatggctgaggcaaacgccggttgttgcacttccgttttgaaacggaagcgtggccgtccggccaagggaagccgcgttccgaaagggatgactccgccgtcgaggcagaaaaaggaagaagaggatgtttgcttcatatgcttcgacggtggaa

SEQ ID NO: 7824 - DNA, 268 bp, Glycine max
  Clone ID: 701100380H1
cctcgagccgctcgagccgaatcggctcgaggaaggaacacgtcgtcttctttcaccccgacatgggcattgccggggcggacgcctggtcatcgatgccgcagtcggcctccagaatcgcgggcacaaggtcaccatcttcacatcgcactgcgacccgcaacactgcttcgatgaggcgcgcgatggtaagcctctactacaacacctcggaccacccgccgcctatgcctggccacgcagctgagacctgacgcgcgcacaaagg

SEQ ID NO: 7825 - DNA, 260 bp, Glycine max
  Clone ID: 701100381H1
caagagtacatgatcaaagttcgggaaaatgaagcgcaagacaaggatatgaagtcaaagcgtgaggccagatggaagcgtttggaagatatgggaggcatgaaagctacaaccaacgaagcagttctagtttctcccagaactgcttctcataccccttctggcaaggcaagtagagctcagttggagtgataattgatttttggcattgcagagttgaaaagccataacttatgctgcattgcattatgctgcataag

SEQ ID NO: 7826 - DNA, 262 bp, Glycine max
  Clone ID: 701100382H1
agatgatacttcaagtatatccaacagtgtcaggtctcttacaaccatgccaacagagtttacaggttccgttcagcctgaaaattattcagaagaaagcactttgattgtggataactcagatgtgaaaaatgatcttatgcctgcagttatggtcaagggaaaagatcaattttctaaccattatacatcatcttttgatggaaatgcatgcttattgattgatgaagcgcggcaggaaaaggctaatagtcatatgcag

SEQ ID NO: 7827 - DNA, 238 bp, Glycine max
  Clone ID: 701100383H1
cgaccttgcttttcaattccctgaactggtgaccctcagaagttgtgatatactaccatcaagttggatatctgtagcctggtatccaatttacaggataccaactggtccaacattaaaagatctagatgcttgttttctgacataccattctctttatacgcccatgggaggttcacaaagagtgcaggctcgcatgccacgtcctactgacatggacgatgtccataaaatgtct

SEQ ID NO: 7828 - DNA, 92 bp, Glycine max
  Clone ID: 701100386H1
gatttacgagaagcaccagcgcgtatgggtaggagcggtcaacgaggaagacgaggaggcgcgtgcgtacgacatcgccgcgcagggttccg

SEQ ID NO: 7829 - DNA, 252 bp, Glycine max
  Clone ID: 701100387H1
caaaactcttgacgccacaaaggaacaacaacatagtactgtaccgtttatgccatccttgcaagatgttaatgttaccatcgataaaacaaaaccccataaagaagtcgtcgctaacctcgtccaaggggaaaagaggaataggaatagcagtttagtgagaattgaagaagacttggctgaagcaagagtagctattcgcagagcgatactaaagagaaacttcacatcagataagaaagagatctttgt

SEQ ID NO: 7830 - DNA, 260 bp, Glycine max
  Clone ID: 701100392H1
ccttgatcttccttcctctgaaacaagaaccacaatggagaattcgaccgaagaatcccatctccgatcggaaaactccgtcacttacgagtccccttaccctatctacggcatgtcattctccccctcccacccccaccgcctcgccctcggcagcttcatcgaagaatacaacaaccgcgtcgacatcctctctttccaccctgacaccctttcggtaactccccacccttctctctccttcgaccacccttaccctc

SEQ ID NO: 7831 - DNA, 258 bp, Glycine max
  Clone ID: 701100393H1
cggctcgagcttgtatgttactttaataggcgtcgttcctcttggctgagaaaacaagtaacagtaaagcgcctattacgcgaactgcaggagactcaactgtccctctatatccctacaaagaaatagaaagagccacaagttttttctctgaaaaacataggcagggaactggagctttcggcacagtttatgctggacaccttcacaatgatgagtgtgttgctataaaaaagatcaagtatagagacaccaaca

SEQ ID NO: 7832 - DNA, 261 bp, Glycine max
  Clone ID: 701100394H1
agccaactcggccgagtcggaagcgcttgccctctttgacctttccaaagaacagaagaactactctcatcccaaaaactggcctctcggatacggcggcgacgacgaagacgaagacgagctcgccgagtcgttccgcttcgactcggcgtgttcgaccgagtcgaacgagttggcactcttttccctgcgcaagtttgcgcgcgaactggagatgctgggtttaaagatcgttgatgggttaacaaaggacttggggtg

SEQ ID NO: 7833 - DNA, 261 bp, Glycine max
  Clone ID: 701100395H1
caatcagcggtgatttttgtttataataggaggatctgatgtactcgctcgtggatctcagctatattcacgatcatgatggcccttgaaaattctgaaaatatgcaaataaactgtgaggcatctttaaaatgcctccagggcaagggatttccttgcaattttcaaagtaatgggaattctatggaaggctttacagagcttaaaaatgagcctggtactcaccctgctggggatgttgctgaccctaactgtcactta

SEQ ID NO: 7834 - DNA, 267 bp, Glycine max
  Clone ID: 701100396H1
ctcacgcatttcctcgttttcttcttcttcccttttctctcttctcactctttctccggcgacgatctcagattccggtcactcctctcgccggcgatcccttattcctccgtcctccgtcgagtcctttccgattcgaatcgttcccagccttgtgccaccatgaatcccgaatacgattatttgttcaagcttttgctgattggagattctcgtgtaggcaagtcatgtcttctcctgaggtttgctgatgattcataccttgac

SEQ ID NO: 7835 - DNA, 289 bp, Glycine max
  Clone ID: 701100401H1
attctgggcacctaaaagttgcagactttggggttagcaagttgctggcagttaaagaagacaagcctctaacttgccaagatacttcctgccgctatgtggctcctgaagttttcagacaagaagaatatgacactaaagtggatgtattttcatttgcactaattctgcaagagatgattgaaggctgccctcctttttctgcaaagcaagacgatgaagttcccaaggtatatgctgcaaaagagcgtccacctttccaagcaccagccaagcgttactcccatgg

SEQ ID NO: 7836 - DNA, 273 bp, Glycine max
  Clone ID: 701100402H1
ccgtgatggaagagtggacaaagtggaagccttgaagcactacaaatttagcttagcatttgagaattctagcgatgtagattaagtaactgtgaaatgtctgtacaatgccattgttactggatctaaaggtgtgggtgtgattacagctgttgtcagagataactaagaaagtcttgcacggatactgatatgtagctgggatcaaggaactatgacttgtatcagagctgcagggtcgctccgtatgtatttttaaaatccgaggattga

SEQ ID NO: 7837 - DNA, 276 bp, Glycine max
  Clone ID: 701100404H1
aaagcagatgagcagcaactcaggaaaagtggtgtgtgtgactggtgcttctggtttcattgcttcatggatcatcaaactgcttctccaacgtggttacactgtcagggccactgttcgcgacccatctaaacccgaaaaggttgatcacttgctcaaacttgatggtgcaaaggagaggctacatctctttaaggcagatctgctggaagaaggttcctttgactctgcttttgagggttgtgatggtgtctttcatactgcttaccccgttca

SEQ ID NO: 7838 - DNA, 282 bp, Glycine max
  Clone ID: 701100405H1
tatgcagctcgagattcattattggtaaagcattaatctccacgtggccttgccttatcatgtgcaattgttgtgcatatagataagcacatccaaatgtctgctttgacttagtttcatacactccctcctgtttgattacgaaaatgtggaagagaaggggatttgaagaagaagcagttcaattgataaactcagatttcagagacctaagtctagctggcataggctttggagcctctttcttcggattctttgctgccattgctgctatttatctgt

SEQ ID NO: 7839 - DNA, 270 bp, Glycine max
  Clone ID: 701100406H1
gccatttaattggttcttattgtgtttgtgagtgtgctataaatccttcgtggtttttggtgaccctttgggttctatagtgagtgcaaggtaacccactttggattggaaggttgtcgcaatggggaaggttgtgttgttgtttctttgcatggtgttggtggtggtgtctttggcttgtgctgattcaattgagaagcttgaggttcagaagcacttgaagaacttgaatagacctcctgttaggtccatcaagagtcctgatggaga

SEQ ID NO: 7840 - DNA, 266 bp, Glycine max
  Clone ID: 701100407H1
attgcatctgagctgtgttgttggactattgtagagaaggtgataggcatgtatattcttttcttcctcttttttcttttcaccccttctcccttctcccttctcatataaatttttctgttcaatgaaaaactgagtgtgaaataatcacatgctctccttgcttctggcactctttcacttgattcatcataccaagcattgaagcaaaaaaaaaaaaaaaaagcgacaacaacgaaagcaaagaaaagagaccaaaatgatgg

SEQ ID NO: 7841 - DNA, 274 bp, Glycine max
  Clone ID: 701100408H1
ctcgagccgctcattcacacattcacagttatactctctctctctttgtcgcttggatcaatgatctcatctcaattttcagatatgtcgacatctgataagccagaagtggtggaaaggggtagcaaggatgaaaaacacaaggaagatgatcaagaggaggggaagggtggattcattgagaaggtgaaggatttcattcatgacattggtgagaagattgaggaagctattgggtttgggaagccaactgctgacgttactgcgattcaca

SEQ ID NO: 7842 - DNA, 276 bp, Glycine max
  Clone ID: 701100409H1
ataatttgttcatgtttgttcctccacattaacaattttcaaaaaaatcactatatattatgatgagaaatttatacattcaaaattgtcaggtcatctctatgttaaaagtgatgtatatggatttggcgttgttctgctagaaatgctaacaggtagggcagctctagacacaaatcagcccgcgggtatgcagaatttggtggagtgcactatgtcatgtctacatgacaaaaagagactgaaagagataatagacccaaggatgaacgagca

SEQ ID NO: 7843 - DNA, 82 bp, Glycine max
  Clone ID: 701100410H1
ctcgagccgtttcacttttgttcacctttgtttatcacctttgttcatttcgattattcttaagtaaagcatcgttcttttt

SEQ ID NO: 7844 - DNA, 264 bp, Glycine max
  Clone ID: 701100411H1
cttcgatctccaaattcccgtgctttgagtttttggtttttgctcatatgtgctcaatgattgttcaactgttatggtgctttctttagttggtggttcttgtctttgaaagatttttaattaactgggttgttcagaacttgtttagggaatcaataggcacagcttgtcattatgttccagaccagatagcatggaggagcctcaatgtgcaatcaagaaggatgccactgaattggtagggaataccccaatggtatttct

SEQ ID NO: 7845 - DNA, 275 bp, Glycine max
  Clone ID: 701100412H1
catggtcatagtctacacctaattagccaaacacaccacagcaccaaactagttggctcaattctctttgaatggctttggaggctttgaattcaccaacagcagccaccactcccttccgtggttaccaagaagaggaggaggaggttgaccttcacctacgcgagccttgggccaagagaaaacgctccaaacgacctcgttttgagtcggaggaagagtacttggctctttgcctcatcatgcttgcacaaagcggtaactacaacaacacc

SEQ ID NO: 7846 - DNA, 274 bp, Glycine max
  Clone ID: 701100413H1
ctcgagccgctccgatggctaatccctcactcttgttcttcagtctcctcctattatccgacaccgtagccgccgccgaacggatcgacgatgaagacgaccttctgatccgtcaagtggtgccggatgcggaggaccaccacctgctcaacgcggagcaccacttctccgccttcaagacaaagttcggcaagacctacgccacgcaggaggagcacgaccaccgcttccgtatcttcaagaacaacttgctccgcgccaagtcacaccagaa

SEQ ID NO: 7847 - DNA, 275 bp, Glycine max
  Clone ID: 701100414H1
agaagccgcttctggtctagagagcgtcgagaagctcatcagactcctctcccaaacccaagcccaagcccaagcccaccatcaattcaacaacaacaatatctctagtaatgaaatcgccatcgccatggactgcaaagccgtcgctgacgtggcagtctccaagttccagaaggtcatttccctcctcggccgaacccgtaccggccacgccaggttccgacgcgcccctctccccaaccaacaccaacacacccaacctccctccgaaccgc

SEQ ID NO: 7848 - DNA, 237 bp, Glycine max
  unsure at all n locations
  Clone ID: 701100415H1
agcacatctggagtggaaccttgatggtcttctggagaaaatttgggaatatctcaacttaactcgtatttatactaaacctaaagggatgaatcctgattatgaagaccctgtaatattatcctctaagaagaggacagttgaggacttctgcgatcgcattcacaaggacatgcttaaacagtttaagtatgctttggtctggggttcaagtgcaaaacacaagcctcanagagt

SEQ ID NO: 7849 - DNA, 273 bp, Glycine max
  Clone ID: 701100416H1
ttcacattttagaagaataccccctcttttgctgcatcagaggagttgtaaattaagagcatggctgcacaagctcttgtatcatcatcttctcttaccttctcagcggaggctgcaagacaaagtcttggaccaagatcactccaatctccatttggcttctccagaaaagcctcctttcttgttaaggcagctgctaccccccctgtcaagcaaggatcagacagacctttgtggtttgcatcaaagcaaagtctttcttacttggatggc

SEQ ID NO: 7850 - DNA, 280 bp, Glycine max
  Clone ID: 701100417H1
tattgcttcttcccttttgtcttcaaaggaagagaattcgcaatttgcaattttgcattggcgggcactgaaatcgagagagacatccgaggtccaatttgtcagaaccaatagctcgaagcttctcgtgggctgctccgatggatcgctccgaatattcgctccggaaacggaatcttcctccgacggctccaagtcctacgccttggagaagaacctcgccgggttcgcgaagaagcccgtgctctcaatgacggtggtggagtcgcgagacttcctc

SEQ ID NO: 7851 - DNA, 296 bp, Glycine max
  Clone ID: 701100418H1
acgtaattccgctctagtgcagagtatagcggcaacataccaggatcattatgacttgtggctgccttggagccaaatcgataaaggcaaaacgcccttcttatgttcctggtgaaattgatggctatccgctagataatgtcaggcaattttctgataaagaactgagattggcaactgataattataatccaaacaataagataggacgaggaggttttggaactgtttaccagggaacattaagagatggaaggcatatagcagtgaagactctctcagtttggtcaaagcag

SEQ ID NO: 7852 - DNA, 277 bp, Glycine max
  Clone ID: 701100419H1
cggctcgagctcaacaatggctcatctcttcagagacctctcattgggccactccaagagagactccacgccgccgctgccgccaccgccgataatgcctcccaagcccgccgccgtcaccgccgccgacgaccttccctctccgctcggccaactctccgccagtctctccgattccgacctcgcgctaacggcgtacgagatcttcgtcgccgcgtgccgcacctcctccggcaagcctctcagttccgctgccaaccactcctccaccaattcg

SEQ ID NO: 7853 - DNA, 272 bp, Glycine max
  Clone ID: 701100421H1
agctagcatatatagtttattaatcagttacatatatatacatatataccacctgatatataggcatatagccagttaggtaggtaggtaggtacatagtagttaagttaattcaatcatggaagaaagagatcaccgttgttccaacaattcaacgatgatcacaacaacaaagaaaaaaacgagcagaagaagtcccacatcggataagctgaagaatcaacacccctgtgagaagcaggcgatgaaaccgtacagaggaataaggatgc

SEQ ID NO: 7854 - DNA, 267 bp, Glycine max
  Clone ID: 701100422H1
gttgattattgtggttaggttttcactattcatacggggcgaagaggttaaaaaggcaagagttatttcccacaaccattgtatttttttggttgagggcgatgcgtctagctagctagggaaaattaagctgtaattagctaatactgttgagaatagtaactgctgattgaaattatcttttgcttttttcttcatctattgtatgtttatataaaccgttacagaaggtgttcatctatgaaggaattagaattttttttcaaa

SEQ ID NO: 7855 - DNA, 270 bp, Glycine max
  Clone ID: 701100423H1
tggcaggaagcagcattaacagaggagaaagatggtctctcaatggaatgactgctcttgtcaccggcggcactcgtgggatcgggcactccatagtgagtgacttggctgcgtttggcgctgcagtgcacacctgttccaggacccaaacagagctcaacaaatgcttacaagagtggcagagtcaggggtttcaggtaactgggtcgctctgtgacgtgtcctcaccaccccagagagagaagctcattcaggaagttgcatccacct

SEQ ID NO: 7856 - DNA, 272 bp, Glycine max
  Clone ID: 701100424H1
tatgctgccccttcttctggggctcgaagccaattgggtcggaggctgttgaggggcacgagcagagtttggccatgaaggtctggaactttgcctgccctgatgcccccggtggaatcgataacccctggatcaacccctgtgttcctggggcaccctctttggccactcttgcctgctctaagttgctcgttactatcactggcaaagacgagttcagagacagagatattctctaccaccacaccgttgagcaaagtggctggcaaggt

SEQ ID NO: 7857 - DNA, 157 bp, Glycine max
  unsure at all n locations
  Clone ID: 701100425H1
cagnaacaagggtcagatccacnaaagccctcagcggcaaccggttttccgttgagctatagccattcaacaacgtattcgacctangaggcttcctacgctccagtcccacccccccagcccaaacctcttgtcgattggtccaccggcctctgtg

SEQ ID NO: 7858 - DNA, 270 bp, Glycine max
  Clone ID: 701100426H1
gtggattggggctcagacccattggttgatgtggggctacctgcttgagttcaagggtaaaaatgtcttcttacagctttgggcggcaggcttactgtttctagcagccaacatatttatcctcgtcatgattattcgtcaccataaatatgcttcagttttcaaagctttagaatatgctaactccaagaatgcagctaagcttgaatgatggagagggacatagaagaggaggttaccgtacaggcattctgctctaatgaaataatg

SEQ ID NO: 7859 - DNA, 269 bp, Glycine max
  Clone ID: 701100427H1
ctcattggtacttctcatatatttgtggtgctccctcttcagtttttggtaaactaaacttcttcaattcaagggggtatcaaaatctgctggttggtttcatcaatctgatggaggaaaatctgcctcccggatttaggttccaccctacagatgaaagactcatcacatgttatcttacaaggtaggtttctgattctagcttcacatccaaagctatagcagttgttgatctcaacaagtgtgaacttggggacctcccaggtaag

SEQ ID NO: 7860 - DNA, 259 bp, Glycine max
  Clone ID: 701100428H1
aagaaagtagcagatcctccatggcctccaccaaggaacgtgaaaacttcgtctacgtcgccaagctcgccgaacaagccgaacgctatgaagaaatggtggaagcaatgaagaatgtggcgaactaaacgtggaattgacggtagaggagcggaaccttctgtcggttgggtacaagaacgtggtgggtgctcgtagggcttcgtggaggattctttcctcgattgaacagaaagaagaagctaaagggaacgatgtg

SEQ ID NO: 7861 - DNA, 271 bp, Glycine max
  Clone ID: 701100429H1
ggaataatgggtatctgcatatccgttgcagaagaagctcatgatgatgataatgtgacaatatttgaagcaagaaaggttctaaatgggagtcagagactttgctctgtttactccaaacagggtagcaaaggactcaaccaagatgctgcctctgttcatgagggttatgggatggaggatggaacattttgtggagtttatgatgggcatggagggaatggacacaaagtgagcaaaatagtaagcagtcgtttatcttccctcatac

SEQ ID NO: 7862 - DNA, 274 bp, Glycine max
  Clone ID: 701100431H1
gccggggagcggaggtgcggcgtcggcgcagaacgaagccatagaccggcgagaccgtctccggcgactggctctggagaccatagacttggcgaaggatccctatttcatgcgcaaccacctcggaagctacgaatgcaaactctgtctcactctccacaacaacgagggtaactacttggcccacactcagggcaagcgccaccaaaccaacttggccaaacgtgccgctcgcgaggccaaggacgcccccgcccagccccaaccccacaag

SEQ ID NO: 7863 - DNA, 275 bp, Glycine max
  Clone ID: 701100432H1
cggctcgaggcaagctggtgctgtgaggcaccttgtggacttaatggacccagcagctggaatggttgacaaggcggttgccgtcttagcaaatcttgccacaattccagaaggaagaaatgcaattggtgatgaaggtggtattcctgttctggttgaggttgtggagttgggttctgcgagaggaaaggagaatgcagctgcagctcttctacatctttgctcacatagtcccaaattttcaagcaaggtgcttcaacaaggagctgtcccgc

SEQ ID NO: 7864 - DNA, 287 bp, Glycine max
  Clone ID: 701100433H1
gtttcgatgaagaagagaagatcggggattaacgaactatgaattgaactttctcaatggctcagattcccaacctagacaatgctcctgtcaatctcacatccattagggagcattcgcaaaaagagctcctcaacatcctcaagaatgttcgaggaaagaagtgtttagtcattgatccgaagctcggagactctctctcgcttatcatacagacatccattctcaaggagcatggagttgaattgcggcatctttccggggacccaattcaaactgactgcagc

SEQ ID NO: 7865 - DNA, 98 bp, Glycine max
  Clone ID: 701100434H1
gttcttgcgcggagcggatgttcagatctatggagcaggctcatattattaagcgaaagcctctgagatccgcggtggcggcgtgatggaaatgaagt

SEQ ID NO: 7866 - DNA, 272 bp, Glycine max
  Clone ID: 701100435H1
cacccccaaccactccccatctcttcgctctttttcttcttagaaagagagtgtttgaattgtaattatatactatattgctctatatatactaaaactcactaacaattgataaagcagagattctgcttcaagtgtaatcatccccatcctttatcaccttatctcatcaacacattaatatactgctaatctctatcttccttctctattctatattcaataacccacaaactaacaaataatggctctgttttcacatcaccgacact

SEQ ID NO: 7867 - DNA, 266 bp, Glycine max
  Clone ID: 701100436H1
gtcttatcattattagggtttggcgattcacagagaaagagaaatgggagaacgaaaaggaatcccaattgctctggggctcttggcgatgctcctcttcttcattgcttcttcctcttcctctcacctcgttcgtccttccgatgacgccgacgacgcgatcttctacgagtcattcgacgaggattttgacggacggtggattgtgtccgacaaggaggattacaacggtgtctggaagcatgctaagagtgatgggcatgatg

SEQ ID NO: 7868 - DNA, 270 bp, Glycine max
  Clone ID: 701100437H1
tttcaaattattctgtggcaaggagagaagaaaagatcatagaaagtggtgattcttcgaatattgaagagagaaatatggggttgagattgaaggagacattctacttgtcccatggagcaccaactcttgccgtagatgattcaatccctgcgtggaacttcttcaattcgtggaaggagcagtttccgacgagaccctcttccattcttattatctccgcccactgggacacccatgttcccaccgtcaacgtcgttcaccagaatg

SEQ ID NO: 7869 - DNA, 269 bp, Glycine max
  Clone ID: 701100438H1
caacaaactcacaaaatggataagcaaattttctttcttcttccccttctcatcatgtccctcttcactgtttcaatagccgctgaatcttccagctcatgccccatggatctcaactatgttgagacctttccatgggactcttcatcctgcagagaccctgttgacaagaaccactgctgccaagtcttgctaagtgtaattggcataggactttcccaacatctcaaacaaacttccttgtttcaacttcccaatgaaaccatttc

SEQ ID NO: 7870 - DNA, 267 bp, Glycine max
  Clone ID: 701100439H1
tatcaaactcattctgtcttttcttctatttttatttctatccaatcatccatggccgaggaaccccaaaaaccagcctccgctgaagaagtggtcgctgttcctgcggagaacccaccatctgaagccgaagctgaaaacatcgaagcagagaaggcccagagtggtgtagaagacaagatttcccagtcggtttcgttcaaggaggagaccaacgtggttggcgacctccccgaggcgcagaagaaagcccttgatgagctcaag

SEQ ID NO: 7871 - DNA, 270 bp, Glycine max
  Clone ID: 701100440H1
caagcactcctggtgttagtgcctcccttttcaatgcattggctaaggccaatataaatgtccgtgctatagcgcaaggttgttctgagtacaatattactgttgttgttaagcgagaggattgtataaaggctttacgagctgtccattccagattttatctctcaagaaccaccatagcaatgggcattattggacctggattaattgggagcacactacttgaccagctaagggatcaggcctcaaccctgaaagaagaattcaaca

SEQ ID NO: 7872 - DNA, 258 bp, Glycine max
  Clone ID: 701100442H1
cttctcgattcgcttccgtagccgggcgatttgaggacccagaaaagaacgaaccgaacgttttatattttttcggataatcaatcgaagatgtctcgttgcttccctttcccccctcctgggtatagggcacgtggcgacgccttgatcgaatcgattaaggtttgttgagccgtttcgattttgcgttcgtgcgcaactctctctgcatgttgtttcttgcataaatctgccaccccttttgcgattaaggtaaat

SEQ ID NO: 7873 - DNA, 264 bp, Glycine max
  Clone ID: 701100443H1
tctcgagccgaatcggctcgaggtgaacttgacaaattatcaatggctaacatcacggcaaatacttcaaggttgtggggattttttattgcctgttattgggtttcaattgttacgtttgctctcctatggagggcttacaaacatgtgtcatggctgcgagctgaagctcttaagtctcctgatgtgaagcctgaacagtttgctatagttgtgagagacatacctcatgttcctcaaggtcagactaggaaggaacaggtt

SEQ ID NO: 7874 - DNA, 185 bp, Glycine max
  Clone ID: 701100445H1
ctcagaatttctaaaggaaaattatgtgcactacttgtttgacattgagttgttgctgttaggatttcgtttcaaaaggatatgcttgtaagttgtaatccaggatttctccatgtcaaagaaatccaaggttgttcctgacatttcgctgtttcgataaataaattatgtggcatctttctatt

SEQ ID NO: 7875 - DNA, 270 bp, Glycine max
  Clone ID: 701100446H1
gtttgcgtgaagcaatggaagggaatttgccacagggaggtataattcaaggtgggacttcttttggtggctttgatttgccgggatcaattcgggttcagcatcaagcacaacatccccattccatgcatcaacatcaacctcatccgcgacaagggtcttctgtacattccgccgttcatgatggttttccacttacaatgggaaccatgcagaactgtgaccaaaccatttcattggctgactttagtaaaggagacagaagtaaaa

SEQ ID NO: 7876 - DNA, 270 bp, Glycine max
  Clone ID: 701100447H1
tgtgacatggtgtaaccaacttgaattgctggctcaccaagccactggctgctttgtgacacattgtggctggaattccaccctcgaaagccttagcctcggtgttccggtggtgtgtttgccacagtgggctgaccagttgcctgatgctaagtttttggatgaaatctgggatgttggtgtgtggcctaaggaggatgagaaaggaattgtgaggaagcaagagtttgtcaagagtttgaaggttgtgatggagggtgaaagaagccg

SEQ ID NO: 7877 - DNA, 278 bp, Glycine max
  Clone ID: 701100449H1
gtttcagtttcggatctctctcttctttcacaccaatttccagcatttgaaacatggcagattcaaaatcaggattgaggaaaccagtgttcaccaaggttgatcagctttgcccggggaccagtgggcacactttaactgtgaaggtggtcaatgctaagatggtgatgcagagaggtcgctctgatggtcctcaatctcgtcaaatgcgaattgctgagtgcttcgttggtgatgagactggaatgatcatattcaccgccagacatgatcaagtg

SEQ ID NO: 7878 - DNA, 270 bp, Glycine max
  Clone ID: 701100451H1
ccgatgggtgcctacaagtatgtttcagagctatggcgcaagaagcagtctgatgtcatgcgcttcttgcagcgggtgaggtgctgggagtataggcagcaaccttccattgttcgtctgacaaggtctacccgccctgacaaggctcgtcgcttgggcttcaaggctaagcagggctatgtgatttaccgtgttcgtgttaggaggggtggccgaaagagaccagttcccaaaggtattgtttatgggaagcccacaaaccacggagtt

SEQ ID NO: 7879 - DNA, 270 bp, Glycine max
  Clone ID: 701100452H1
cctcgagccgaatcggctcgagctcaatcaccccccctcgcactcactcttcccttcctctggcggcgacaatgtcgactcatgctaggaagaggctgatgagagacttcaagacgctgcaacacgacccgcctgcagggatcagtggtgccccccaggataacaacataatgctgtggaatgctgtcatatttggtcctgatgatactccatgggatggaggcacgttcaagttgacactccaatttactgaggactatccaaataaac

SEQ ID NO: 7880 - DNA, 263 bp, Glycine max
  Clone ID: 701100453H1
tgatttttgagtatcttgaacgggaccctccttacagccgtgagcctttggctgataagataatggatcttgcttttcaattccctgaactggtgacccttagaagttgtgatatactaccatcaagttggatatctgtagcctggtatccaatttacaggataccaactggtccaacattaaaagatctcgatgcttgttttctgacataccattctctttatatgcccatgggaggttcacaaagagtccaggctcccatg

SEQ ID NO: 7881 - DNA, 267 bp, Glycine max
  Clone ID: 701100455H1
gctgaaactgacatccaagactatctccaactcttcttcctctggttactctccatcatcgccgttagagccatactcaccaaactccgccacaagcctcgccgtccaccgggcccacggtccctccccatcatcggccacctccatctcatctccgccctgcctcaccagtctttccacgcgctctccacgcgctacggccccgccgtgcaagtcttcctcggctccgtccccgccgtggtcgtttcgtgcccggaactcgcgaag

SEQ ID NO: 7882 - DNA, 234 bp, Glycine max
  Clone ID: 701100457H1
aagagatagagacaaacaagcaaagcaaagaaggttcacgttcacgttctgttctgttctggttcacactttcacgagcccatcaccgactctctgcacctgcaactgcaacttccaacttcaacttcaaccactgcaagcttagctctgaaagaaaagaaaagaaaaagaaaatatctccatttggtttggttggtgaaagttgaaaccttttcacgagctcaagtttgtagt

SEQ ID NO: 7883 - DNA, 267 bp, Glycine max
  Clone ID: 701100458H1
gggaagaggtcgagtttcacagcagcaatagtgtacgtcaaggctcagaaatcaaaagcctacttcaagagatatcaagtcaagttcaagagaagaagagagggaaaaaccgattaccgtgccaggattcggttgattaatcaggacaagaacaaatataacactccgaaataccgatttgttgttcgctttagcaacaaggacattgttgcacaaataatatctgctagcattgctggcgatattgttcttgctgcagcatatgca

SEQ ID NO: 7884 - DNA, 267 bp, Glycine max
  Clone ID: 701100460H1
agaacacacattactagaaatttagaaaacatggcagcggtggccggagcatcctcgtccgtgattaaggtggctgcgctttcgggttctttaaggaaaggttcttacaacagaggcctcattcgttctgctattgagctaagcaaaggtagagttgaaggccttcaaatcgagtacgttgatatttcgcccttgccccttctcaacaccgatctcgaggtaaatgggacctacccgcccgaagttgaagcctttcgccagaagatt

SEQ ID NO: 7885 - DNA, 265 bp, Glycine max
  Clone ID: 701100461H1
cactttgcgttttctgcgtcatctccgattccccgacaatggccacccaaatgagcaagaagagaaagttcgtagctgatggagtgttcttcgctgaactgaacgaggttctgacaagggagttagccgaggacggatactccggcgtggaagttagggttacgccgatgcgcaccgaaatcatcatcagagccaccagaacccaagccgttctcggtgagaagggaaggagaatcagggaacttacctcggtggttcagaagag

SEQ ID NO: 7886 - DNA, 267 bp, Glycine max
  Clone ID: 701100462H1
taaaatctgtattttcagtatgcacaacagggataggcaatggttcatgcaaatgtaaaaaattgtcttcactcacattatcattctccccctgaagggaatttttttgaaaaaaaggttgatgttctagaaaggtaacatccatgctaacacaaagcttttttgtaataggattaaatactctgtatcccttgtggttggagaatatccaacaaagatgtacttttctgcccttgggtccagtttagaccgagatatggagggtgt

SEQ ID NO: 7887 - DNA, 270 bp, Glycine max
  Clone ID: 701100463H1
cagctaccttgcaaagcaacacatggcttctacagacaagcatggccgcactgcatacagaacatcatcttcaactccagctcctgcgggtgttgattactttaaatttgatgttatcctaaggtttgtgttatttgcagcatcactggtagctgttgtggtgatcgtcactggtaatcaaacagaggttattcttgtgccacagcctgtgccatggccagccaagttcagatacacaccagcctttgtgtattttgtagctgcattgtc

SEQ ID NO: 7888 - DNA, 271 bp, Glycine max
  Clone ID: 701100466H1
aggttttgtcttgccagacccaaagaataggttgctcctttcgagtgtcctcatcttggtttcattgatttctggtgcttatttcgttggtaatgcattctttccaaaggaatacaaacaaagattagcacgatgggggctaattcatacaatgtcacattcaaaatttaatgcgtgcaagagacaatgcttgccttttggaagtgaggcattgcctgaaggaatgattgctagaacatctaacttggaaatgcggcccttatgggactct

SEQ ID NO: 7889 - DNA, 91 bp, Glycine max
  Clone ID: 701100467H1
ctaccctgtaaatggaggaggagaaacagagaggcaaagggcacagactattgctgatgccatcaccattacaaggccacatagcaccatt

SEQ ID NO: 7890 - DNA, 261 bp, Glycine max
  Clone ID: 701100470H1
cgattactcaggataagaaggattacactttgtcgaatagggagatgcttcaggctgtggagtaccatgccgagagtgggttgaaggagtgggctactgcggtggttaagcttgaggtgaatgaggaaatgggtggtgctgatgtgcattttgaagcgtttcagatgagtgatgtgtgtgtgaggttgtttaaggaagggtggttcgagacggagatcaaggaggacgatgatcccaagttgtcgaagatgaagaaggatg

SEQ ID NO: 7891 - DNA, 261 bp, Glycine max
  Clone ID: 701100471H1
cgcctccggaggtaggacccacgagtgctccatctgccacaagtccttccccaccggacaggccctcggcggacacaaacgttgtcactacgaaggtaacagtaatggaaataacaacaacagtaacagctctgtcaccgccgcctcggaaggcgtggggtccacccacaccgtgagtcacggccaccaccgagacttcgatctcaacatcccggcttttccggatttttcgaccaaggtcggagaagacgaggttgagag

SEQ ID NO: 7892 - DNA, 267 bp, Glycine max
  Clone ID: 701100472H1
agaacagaggcgtcccacgccgtcttacgtcgctttcaccgattccgagcctttgatcggtgatgtcgccatgaatcccactaacatcgtcttcgtgaggcaattccagctccaatctcttccaatcccttccacgcgtaatcacttgcgtgcaaactgaatttgttgatattggacagttccctcacgtagcaattttgaagatgtaagtgtagctctgactgatatcttgaagctacctctgatggataaaagcaatggctgcag

SEQ ID NO: 7893 - DNA, 221 bp, Glycine max
  Clone ID: 701100473H1
cgtactcggaatcgcgttttcgccgcggcgtgccggagccgaagatgccgatctacgacgtgcgaatgaacgtgaacagggaggacgagttcccgttctacgtgcagctggtctcgtgggacaaggagaacgtctccagcgaggcttaggaggcggcgcgcatcgcatgcgacaagtacatggccaagttcggcggcaaagatgccttccagctgcgcgtg

SEQ ID NO: 7894 - DNA, 256 bp, Glycine max
  Clone ID: 701100474H1
gccaaggctgctcagagtttaaatggaaaattggagattgctggcaggactatcaaggtttcatgtgtaacagatcatgttgcaagccaagatgcaactgcaaaatctgcagacttggatgacgatgaaggtggattgactttaaatgctcactcaagagcattgcttatgcagaggctggctggcgcagaccctgcaagcataggtttgcctgttgtgaatggctcagttcctgctcagcaggctatcagcttgc

SEQ ID NO: 7895 - DNA, 265 bp, Glycine max
  Clone ID: 701100475H1
gggatagaagcagttatacaccctcgagaatggtgaaattccaggcaaaattataaacgcatttttttctctccgtccaaacggcagatccgatccgccctacaatcccctctcagtttttctctcgaggatccggtgaaacgacatggcgatggtggaccagcctctgtatccgattgccgttttgatcgacgagttgaagaacgaggacattcagctgcgcctgaactcgatccggaggctctccacgatcgcgcgcgcgctc

SEQ ID NO: 7896 - DNA, 245 bp, Glycine max
  Clone ID: 701100476H1
ctctctacaagttacaatcattaggagagacaaaaaaaaaaaaacacttactcttgaatattcatgaccatgaaggcctctatagtcctatactcacctttgggaaggggacccctagtttccatggtgcaattaggcaaactcatactaacccaccacccttcactttccatcaccattcttttcctaaccccacccccaaaccaggcaacacccacttccccaagggctttaactggggaggc

SEQ ID NO: 7897 - DNA, 248 bp, Glycine max
  Clone ID: 701100477H1
ctatacctcccaaggtttcctctctacctcgttaccttatctcactccctccctcgtcgaacctactccaaaaccaccctcttacgcccacccaaatccactctcacaacctcacaacccttaaccgttaacccttcccccacagagctatccctcgagaagctcttcgttccgccggagaccaccgtgtccctcgaaagttcaagagtcttgaacggttctaacattctgctgagtaactacgccaa

SEQ ID NO: 7898 - DNA, 265 bp, Glycine max
  Clone ID: 701100478H1
agaagaaccaacaagaggggtattgagactgagattcaagtaatggggaagagcaaggttcttgtggtgaggggaactgggtacatagggaggaggatactgagggcaagcctggcactgggccatgagacctacgtggttcagaggccagagttgagacctccagatagagaagctgcagaggctcctctccgtcaagaagcaaggtgctcatctcattgaggcctctatcaatgatcacaagagccttgttgatgctgtgaag

SEQ ID NO: 7899 - DNA, 266 bp, Glycine max
  Clone ID: 701100479H1
tctccctccaaattttccttcattctcacgctccgccgtggtttccgccggcggctactccctatccaccgcgcatccatcccgcttccctctcctcgcttttctcacaaaacaaaaaaaattaaaaatttctccgaagactgtgtattatcgttatcgttcactgagttaggttttgctgttcttcctagggttttattgtgtccaataacaagaggagggggaagagaaacaaaacaataaaaaaaaaagattaaaaggcaaaa

SEQ ID NO: 7900 - DNA, 268 bp, Glycine max
  Clone ID: 701100480H1
ctttgttgctgatgctgctatcataactgttcctattggaatcctaaaagccaatttaattcaatttgaaccaaaacttcctgattggaaggtttcagcaatttcagaccttggtgtgggcaatgaaaataagattgccctaagatttgacaaagtattttggcctaatgtagaactcttgggcactgttgctccgacctcttatacctgtggctattttctcaatcttcacaaagcaacaggccatcctgttcttgtctacatggta

SEQ ID NO: 7901 - DNA, 256 bp, Glycine max
  Clone ID: 701100483H1
tggaaatgaaagcctagaagaaaattatgatcaaagtagaaacctagtaaatgacaacggtagctcaaaatgttacatacctagcttcaccaatgaattctgggaaagttctgcattcaatgcccccaaaacagaaaatgaagatgaaatcatgttttccacttcaaatggtttggaatctcaggaaacagatttcagctatcaaaatcatggtttgactcaccatttgagtctacctagctcttctactaagatg

SEQ ID NO: 7902 - DNA, 264 bp, Glycine max
  Clone ID: 701100484H1
aaactcccaagtgataaacagaagaggtttcactttttcaattgctttttctttcctaagcttgttgatttaagcacagataatcgttcaattgcttgtgatggtaaagcagcatttcagcgtgtaagcaattggacaagaaaagtgaacctttttgaaaaggattatatcttcattcccataaactatagtcttcattggagtttgattgtcatttgtcaccctgctgaagtcatgacatgctacagagatgaagaaactaag

SEQ ID NO: 7903 - DNA, 264 bp, Glycine max
  Clone ID: 701100485H1
gaaaacagagagcgaagaaggagaagagatcagaaaaatggcgtccaaagctccaaagaaggccaatctcctcgatcaccactccatcaagcacatcctcgacgagtcagtctccgaggtggtaacgagtcgtgggtttgtggaagacgtgagattgagcaatgtgaggcttctcattggggcaatcatcatcgtcattgctctcttcgcccaattctacaagaagaagttccctgaaaatagggattttctcatcgcctgcat

SEQ ID NO: 7904 - DNA, 260 bp, Glycine max
  Clone ID: 701100486H1
ttttgctccaaaatcagaacaaataccaaagcttccatctgatttgcagagagttttttctcaagggaccaaccaaggacactatagagagagaaagtggttctgttctttctgctcttgattttgcactggtggattgaaggttgtgtcgttcctggatcgttctttttctgttgcggagacatgttggacggtcgttcctgcgttgttccgaggttgttttccggcacttgccaggcggagaacgaatggtcttacat

SEQ ID NO: 7905 - DNA, 261 bp, Glycine max
  Clone ID: 701100487H1
ctgctatttgccattgtcactctcattctcgatggcggcgaagatttcattggcaattggtttgagaactctcttcactgttttgggacttcttatgcttgctatcgttctttacactgtcttcaccgatggtcttccgtttcgcaaagaacttctcacaccgtggatggcagcaactttgattgatttttatatcaacgttgtagctttggcggtctggattgcttacaaggaatcaaacttaatcagctcaattctgtg

SEQ ID NO: 7906 - DNA, 267 bp, Glycine max
  unsure at all n locations
  Clone ID: 701100488H1
actcgagncgaatcggctcgagcggctcgagctggtcgtctttaaataccaagagatctgaaaacctaaatgtatcagggcatgtagctccgtgtgagaaacatcctggaagccttttggaaggatttactcagacacagattagtacactggctgtgcgggataagttgttgattgccgggggttttcaaggagaacttatttgcaagtatgtagatcgacctggtgttagcttttgttctagaactacttatgatgacaatgcaa

SEQ ID NO: 7907 - DNA, 253 bp, Glycine max
  Clone ID: 701100489H1
aacaacttttcatacatgaccatgctgcctcggtcatttactatgattgcaacaataataatcattgttcttgctcaaacacttgtgggggtgatttcacttcctgaagctgataaaataagcaatttgccgggccagccacaggtcgaatttcagcaatattctggttatgtcaccgtggatgatcaacatcagagagctttgttttactactttgttgaagctgaagaagaccctgcttccaagccattag

SEQ ID NO: 7908 - DNA, 265 bp, Glycine max
  Clone ID: 701100491H1
ccaacctcttcctccgactaccgttctacatcctattttgaccttagtccatgggaaactgcagcagcggggctccagcccccaccacctactccgacgaccatccccaccacaacggcattaccgtcctccctcccaactcaaacccttcaccccaactccccaagcccccaccgacctcctcctcctcctcctcgctgggccgggttttgggccggcccatggaggatgtccggtccatttacatattcgggcgggagctggg

SEQ ID NO: 7909 - DNA, 259 bp, Glycine max
  Clone ID: 701100492H1
tcgagctttattggcaggtttatctgagcttagctttgacccaagacctgagattaggaagagtgccttggaagtcctgtttgaaaccttacgtaatcatgggcatctcttttcactacctttatgggaaagagtatttgagtctatcctatttcctatattcgattatgttcgacattctattgatccttcagggagtagttcaccgatcaatgaagtagaggctgatggtgagcttgatcaagatgcttggctttac

SEQ ID NO: 7910 - DNA, 259 bp, Glycine max
  Clone ID: 701100494H1
atttggactttttgattgcccttggaattgtgtccatttgtctctgctttggtcacatacacattaatccttctttgaattgaactttctgagctacacgtaagacatcaggttcaagtctaggtcatggggatcaaacataagtgccacaaccataatgtttgctttattttgtggcagtgtttttgtttgataatcctttgatctgggtttaatttcaattttctcgtttgagtttttgtccaccatgtgatgagta

SEQ ID NO: 7911 - DNA, 266 bp, Glycine max
  Clone ID: 701100495H1
cctcgagccgattcggctcgagagcaaatacccctttattaatcttaaaggttttattgtagggaacccagaaactgatgattactatgactataaaggccttcttgaatatgcatggagccatgcggttatatcagaccagcaatacgacaaagcaaaacaagtatgtgattttaaacaatttgattggtcaaatgaatgcaacaaggccatgaacgaagtcttccaagattactcagaaattgacatatacaacatttatgccc

SEQ ID NO: 7912 - DNA, 268 bp, Glycine max
  Clone ID: 701100496H1
ctggatcttctgggtgggacctttcattggcgctgcacttgcagcactctaccaccaggtcgtaatcagggccattcccttcaagtccaagtgattcaatcaaaccgttcatgcttaatcaagttgggaacaacaaaaaaaatcaaaacaatgtttctgggtttcggtttcatttcatcaagatgatctgtttacctttttttttttaattttaatttaaagtctttgtattttgtatgtaaagatgtaaaattatgattattaggtg

SEQ ID NO: 7913 - DNA, 271 bp, Glycine max
  Clone ID: 701100502H1
ctttgaggaggttcggtagagtggcgtggcgttttactcacaacatcatcaacattatcaaatccacctcttccggcaacctcaatttccgctccctaaatcatgctcgcgtttcgatcgaagccttgttgcagttacaaggaaacagcgtccctcgcacttgcacacttcaggcacttcgtgttcaactacgcacgcgccgggagctctcggtgccctccacgcgccggcttcggggttcggagaggctacatcgtcgttgcctcgttgg

SEQ ID NO: 7914 - DNA, 269 bp, Glycine max
  Clone ID: 701100503H1
gcaaaattgaaggcttggttccttctctccgtgcttccccgcacgtgacaacatgggaaaacaatgcagtcagatctcgagcaacagccgcaggtgaattcctcgggtttaactcggtaccgatcggcgccgagttcttattgaccgaacatcattgaccgcgagttctacgagcacgtcttcaaccgtccctcgagtcccgaaacggagcgagtgttctcacgcttcatgaacagcttaaacagtgaagaagaagattcgctccatca

SEQ ID NO: 7915 - DNA, 269 bp, Glycine max
  Clone ID: 701100504H1
agctggaaggttcggccagcattggcctgtggtaacaccattgttctcaaaacagctgagcagactccattatctgctttgtatgcatcaaagttgcttcatgaggctggacttcctcctggcgttctgaatgtaatatctggctttggtcctaccgctggtgctgccattgctagtcacatggacatagataagcttgctttcactggttcaaccgaaactggaaaagttgtccttgaattggcagctagaagtaatcttaagcctgt

SEQ ID NO: 7916 - DNA, 265 bp, Glycine max
  Clone ID: 701100505H1
aaccccttcttcacgttacctacgtggtcattcaaaaccacagtacgaagaggaaaaaaacaaaaaagtcataatatatatcaacaaaagggaacgatattttcagcaaagttttgctctccacgtttattgaatcaaggtcttttctaatgctaggtgttgaatttggttaaccagtcttggaggtttatctgctattattaaaagtgttgggatacaagtaccaagcagaagtttgccaaggcagctgcttttagctgatgcc

SEQ ID NO: 7917 - DNA, 269 bp, Glycine max
  Clone ID: 701100506H1
cttcgccactctctttctcatgcccgttgtgtccgacgcaagggttgtgtgacggagagcaatccttcgccgcacggcgggcgtggcgctctgccttccgaaggtggcagcccctccgacctcctcttcctcgctggcggtggttcttcccattaacattctaaagtagtattagccattaacattacatcctacaccttcaaaagttctctctattagcggtttctggtttcttttgttcttcttctttggtagttgttaggtttggt

SEQ ID NO: 7918 - DNA, 270 bp, Glycine max
  Clone ID: 701100507H1
actgactctaattttaaccaccattctcacttctcactcttcaatcacaatgttaatctcatcacctaaacaacccttcctcctcgtaaccatcttaatcaccatcttgttattgggcccaggcccaatcctcgctcgcaacgcccacgtcatcaatttccggtcaccgaacctctacccggaatccctaacgtgggacccacgcgcgcacacttcctcctcggatccctccgccagcgcatcatcgccgccgtctccgacgcgggggtc

SEQ ID NO: 7919 - DNA, 273 bp, Glycine max
  Clone ID: 701100508H1
cctcgagccgaatcggctcgagaaacaacagagaaagtaagcaagacaccgaagagaagaaaaaatgccgtgcctcaacctcaacaccaacgtgtccctcgacggcgtcgacacctcttccatcctcgccgaagccacctcctccgttgccaacatcatcggcaaacccgcggcctatgtgatgattgtactgaaaggatcagtacccatagcttttggtgggaatgaacagccagcagcttatggagaattggtgtccattggtggtcttaa

SEQ ID NO: 7920 - DNA, 272 bp, Glycine max
  Clone ID: 701100509H1
tacggctaatgctctgactttgcctcttgtgattaagaagcttttgacggtgtctgagtcgagttcaagctttgcggttccggttctttggaaacttttttgtgacaagaatgaagaaggggtgttgattgacgcgcttcaaatgggagtgtttcataaactacttgttttgttgcaagtgggttgtggtgagggaaccaaagagaaggctacggagttgttgaagttgttgaatggttgtaggagcaaagccgagtgtgttgattcgtcct

SEQ ID NO: 7921 - DNA, 272 bp, Glycine max
  Clone ID: 701100510H1
cggacccacaggacctaagctcatttggcgaaggtgttccctgctttggaagcccttgaagatggtttgccaaatgagttgttgggacaggagggacccacaggacctaagctcaaaagaaattggcaaggtgatgaggtttgaaatggaagacttggagaaccgtggcattattgacaccatgcaattaaaaaaggagactttaatttggttggtttgcactatctgttttgtatttttatagggttcacaacaaacatgtatttcttaat

SEQ ID NO: 7922 - DNA, 275 bp, Glycine max
  Clone ID: 701100511H1
cccaatcaaacaatggcaatgataaataggcttcaagaagagaaagcagcaatgcagatggacagccttgcagtatcaaagaatgatggaagaacaatctgagtatgatcaggaggctttgcaactcttgaatgagctcatgatgaagagggagaaagagaagctagagctagaaaaggagcttgaagtatatagaaagaaggttcatgaatatgaggcaagagaaaagatgatgatgtcaagaagagatggtagcatgagaagcagaacttcat

SEQ ID NO: 7923 - DNA, 272 bp, Glycine max
  Clone ID: 701100513H1
caatattgctctctaagctttgattcttcttaattcatacagatcccacactcattcattagcgtgcgtctggttttctgcctgaaatggagtacatgaaccagagaccaaaatatgattgccttctttttgatttagatgatactttgtatccactaagcactggtcttgcaaaagcatgtggccaaaacattaaagactatatggccgaaaagcttggcatagagaaaagcaaaattgatgacttgtccaacctcctctacaagaactat

SEQ ID NO: 7924 - DNA, 280 bp, Glycine max
  Clone ID: 701100514H1
cactcgagccgattcggctcgagcatcaaccccatcacaacttccatcaccagcacgaagcagaccaatgtctcacaccagaaacgcacactccttttctgttcccccatgttgattccactgttgtccctgaaccctccaatttcttctcctcaaaccttgtctcaaatccactccccacaaactccttcttccaaaactttgtcctcaaaaacggtgaccaacctgaatacattcacccttacctcatcaaatcctcaaactcttgtctttccctctc

SEQ ID NO: 7925 - DNA, 178 bp, Glycine max
  Clone ID: 701100515H1
cagccgggttcagattccaccccactgacgatccgcttgtgaatcactacttgtgtagaaagtgtgctgcacaaaccattgctgttcccatcatcaaagaaatcgatttgtacaagtttgatccatggcagcttccagagatggctctgtacggggagaaagactgggactttttctc

SEQ ID NO: 7926 - DNA, 276 bp, Glycine max
  Clone ID: 701100516H1
tgcgaattagggtttgtgattggatcgccatcttcaccaattaccattaccatagaacttaatcttctctctcgccatgacggacggcttctggaatcggcagcagccgcttcacccttcttccaccatgctcaaacgacctcgtactgaatatgatatgtcaccttctggtctgacttcaggggggtattgaatgccttatttatattgctcaaattgttgaccacaccggtcatcgaatgctaaaggacactaacacaattggatctgcttatg

SEQ ID NO: 7927 - DNA, 269 bp, Glycine max
  Clone ID: 701100517H1
acgtgctcgcagtcgcggtggcggtggcggtggtggacaccgtagccgtgacggtggttatggcggtggctatggtggcggtggtggtggtggttatggcggtggcacagaccgtggttagcgtctcgtggtggtgatggtcgctgatggaggctcggagaaactcgaggcttgatgtcgtcaattagggtttatgattatgccccgtatttttagttgttgtggtttgagttcgagtttcttaatggtttcgtgttaccgtggttctt

SEQ ID NO: 7928 - DNA, 265 bp, Glycine max
  Clone ID: 701100518H1
cgtggttgagatcgctagggtgatgagcccgcgctccatggcgaaggatcttagtgggaccatcaaggagattctcgggacttgtgtttcggttgggtgcaccgtggatgggaaggaccccaaggatctgcagcaggaaatttctgatggagatgttgaggttcctcttcattgacgttagtgaaatttcagtgtttttttttatttgtttcgattatgttgtttttgttttcggcaattttggttttttttttacaaggataaa

SEQ ID NO: 7929 - DNA, 267 bp, Glycine max
  Clone ID: 701100519H1
cctcaaggtactgcacaaatccccagatctacctgaaagtttgtcttcagagggacaggatttccttcagcagtgtttcagaaggaatccagcagaacgaccatcagcagcagtgcttcttacacatgcctttgtacaaaatttgcatgatcaagatgttcaagttcattcccaagggcaaaactgtcccagaggagaccctggaccaggagatgattcacgtagacatagccccggtaacagttcaagaaatagccgtggtgtagg

SEQ ID NO: 7930 - DNA, 265 bp, Glycine max
  Clone ID: 701100520H1
aattgttccattttcatttctttcgcaaaaatagcaactacttcctcagaaaaaaagtttctaagttaaggaaatccagagagacaaaaattgtcggttacggttcagctacatgcatagacatcctccttaccatcattctccctcctcttggagtctttctcaaatatggctgccaggcggagttctggatttgtttggtgctgaccctttttggttatatacctggaattatctatgctgtctatgctatcaccaagtgatc

SEQ ID NO: 7931 - DNA, 213 bp, Glycine max
  Clone ID: 701100521H1
caattacatatagcacaattctttaagagtgtattactaaggaaaaacaatgaaagttctgtacttccttgttgccatcttggctttgacatcctctcttgtctctgcctatgatcctagtcctctgcaagatttctgtgtggcatccaaagaaaaagatggtgtgtttgtgaacgggaaattttgcaaggaccctaagcttgccaaagttga

SEQ ID NO: 7932 - DNA, 254 bp, Glycine max
  Clone ID: 701100522H1
ccagaagacgtggaggctgtgcagatcagtgggggccctgctggtctggaagcagagttgcagcaacttaaggacctaaggagggtgaatcaagagttgctggtccagactgaggaattgtggcagaacgcagcaagggaagattctgacacttagaagccaatttggcactaaatggaccaggcctcaatcaagcaccttgaccaagaacttgcaggctaggctagacaggtttgcagggaacttgaagcaag

SEQ ID NO: 7933 - DNA, 269 bp, Glycine max
  Clone ID: 701100524H1
cctgcactcaccactgccacacttcaatcgcactaatggctgtcaccttctcagatctacacaccgaatagggcagcgaatccctcgatcaattcctgtctgggaaaacctatatttctggggatcagttgacaaaggatgatattaaagtgtatgcagctgttgttgaaaagcgaggggacacttgtcctaatgctgccaagtggtacgatgctgtctcttctcaacttgctccaagctttcctggccacgctcaaggggtaagattc

SEQ ID NO: 7934 - DNA, 270 bp, Glycine max
  Clone ID: 701100526H1
actccctgctatctcaacaattgctgaaagttcaagcacggtaacaagaagaacggcgaatacagtatacgattacgaatacagaacagagaacgtgaaagtcgtggaggaacgaaccgaggagaaaatacagaggagtgagacagaggccatggggaaaatgggctgcggaaataagagaccctttcaaagctactagggtgtggttaggaacatttgaaaccgctgaggacgcagccagagcctacgatcaagcttcattgcgtttca

SEQ ID NO: 7935 - DNA, 273 bp, Glycine max
  Clone ID: 701100527H1
attcttacaagttacatccattgagaaacatgaaggtctcccccttagcattttcaatccttctttttgtccttcaccatagaactcttcattggcattgcttcagcagcacaagaaccagtgcttgacacctcaggccagacgctgagaacaggtgtcaagtactacattctaccagtcttcagaggcagaggtggaggcctaacagtttcaagcagtggcaacaacacatgccccctctttgtggtgcaagagaagcttgaagtctcaaag

SEQ ID NO: 7936 - DNA, 171 bp, Glycine max
  Clone ID: 701100528H1
cccttttttaattggattttaatcgcatgatttttgttggatgggattcaaactatttgtccttctgatatgaacgttgctttaagcattatgttatttgcgttattttcattattagatggtatactcaattgttatgcactttacctgtaggaattattctgtcttgtt

SEQ ID NO: 7937 - DNA, 274 bp, Glycine max
  Clone ID: 701100529H1
cctttattcatttcatttctcttatcctatgaacactcattatcctcttctctaacaaagccctagtacgacacttttagttcattagttcttcttatcctatggataccattcgtaccaccaccatcacccgcgtgcaacaaacaaccccaacaaagaaaaccaagcccaagaagaagaactcaccccacccagtgaaggtagtctacatatccaaccccatgaagatcaagaccagcgcctccgagtttagggctttggtgcaagagctcac

SEQ ID NO: 7938 - DNA, 190 bp, Glycine max
  Clone ID: 701100530H1
ccacaacccttacaccacgaccttcatatttgcagtgctagtctgcttatttcttcagctatgtttttgtcaagaacacttggacgaacactctttgctgctgctgccagatcaaaacaatatgccactacagcagctgctgctagcagagaaggacacaacccccttcaggagttttttgaggcagaca

SEQ ID NO: 7939 - DNA, 214 bp, Glycine max
  Clone ID: 701100532H1
agacgagtcaaagacaatgtcagggatcattcacaagattgacgagacccttcatgtgggaggcacaagaaggaggaggagcacaagggtgagcagcaccatggtggagaatacaaaggggagcatcatggtgaacacagtactgaatacaaaggagagcatcatgttggtgagcacaacccggagcaccatggaggagaagagcacaaggagg

SEQ ID NO: 7940 - DNA, 227 bp, Glycine max
  Clone ID: 701100533H1
tccgagagacaggatggagacaacagaggaaaaggtgccggtcggcctgccagtgcaattgtattacggtcgagacaatgcaatatcaaaggggaatgatccctcctaacacggtgtttggagatccaaagggcatccccatccagcagaccatttacagggacactcctgctcctttcaactgcccttactgcggtgacaccgctctcactaccgtcagatcaaag

SEQ ID NO: 7941 - DNA, 264 bp, Glycine max
  Clone ID: 701100534H1
acgcactctaactcaggcaaaagccactgttactgttgctaaagtgtttggaggaatggaccgtggagattttcttacattggtggcttctgctgaggctagcagtgaacacccactggcaaaagcaatatcgcaatacgctcgccattttcatttctttgatgagtcttctcccaccagtgataccaagagtgcttctgaggactacaagtcagggtggctttatgatgtctcagacttctctgctcttccaggaaggggcat

SEQ ID NO: 7942 - DNA, 263 bp, Glycine max
  Clone ID: 701100535H1
aggattccgaggatgttaatggttgcctcatggataaacataaacctgtggtggcaccttctttggtttgtgaaaaggttgaagatcatgtaaacggagaagatgatagtgattccaattctttgttgcctcctcggagaggtggcatgtccagaaactgtgaaaagactcgccggaaagtgcagtggaatgataggaatggaaacaagcttgctgaggtgttggaatatgagccaagtgatgtcagtgattcagaagatgag

SEQ ID NO: 7943 - DNA, 263 bp, Glycine max
  Clone ID: 701100537H1
atcagaggagttaccgtgatacattgttttcatttcctgtctctagaattttctatccgctcatccccctcacaaattagggtttctgcgaatcttttatcgtctgaaatcgaatccaacgtttcagccatggtttccgattcaatcgccgccgtaccgattccctccgccgcaaacaccaagaacccggggaagaagaagaggactaacaggtccgcgaaattgaagcagtacaaaatcgatgcgcgccgcgagcaatggtt

SEQ ID NO: 7944 - DNA, 259 bp, Glycine max
  Clone ID: 701100538H1
cgaacggcaattaatttacaatggccgtcacgaaaagcctctcaatcttcctcttcatcgcaatgagctgcgtcgccgcagctcaggcagcgaacttcaacatcacaaataactgcacctacacggtgtgggccgctgccgtgcccggcggcggcgcaaggcttaaccctggcgaatcgtggaacatcagcgtgacgaacggcacaacaggaggacgcatctggggtcgaacaaactgcaccttcgacaacgcgggacg

SEQ ID NO: 7945 - DNA, 266 bp, Glycine max
  Clone ID: 701100539H1
cacacatacatacatacactagtagtctggtgtgaccttcttttatccttttgcttttttcgtgtgcaattaacacacacacacacaaaaatgatggcatgccaagattggccagagccagtgattcgagtccaagccttggctgaaagtggcttaaccacaatccctgaacgtttcataaagcccaagtcccaaagacccactaataataacaactatgctccaaaggtcaatttctctcaaattggtcatcatgagaacaccac

SEQ ID NO: 7946 - DNA, 267 bp, Glycine max
  Clone ID: 701100540H1
cctcctccctcaatccggcgtcgtttcttggctccaacgctaaacgaggcgtcgttaccatggttattccttttcaacgaggaagtgcatgggagcaacctccaccggacttagcttcttacttatacaaaaatcgaattgtttatttgggcatgtctcttgttccatctgttactgagttgatactagctgaatttctttaccttcaatatgaagatgatgataagcctatttacctatacataaactccactgggacaactaagg

SEQ ID NO: 7947 - DNA, 267 bp, Glycine max
  Clone ID: 701100541H1
tcctctcatgagccgtggttaacaaagcgagtcggacctaagctcactgttcaaaggagatcaaactttgtgatcaagacgaaccacacttcttcaattagtgcagaataccgtgataatagaggaggtggaggtggggattttgctgctggctttcttctgggtggtgcagtttttggaactctagcttatatctttgctccccagtttgtgatgcagatcagaagatctctgctaaacgaagatgagtatgggtttcgcaaggcc

SEQ ID NO: 7948 - DNA, 207 bp, Glycine max
  Clone ID: 701100542H1
tctttctctaccaaattgcctttggtcctattatcttcatcccttttcatccatgcatctttggctgagatggtgtgtgaggacctgccaaaggaagtgtgtgctcttctcactagcttcatcagggaagaggtgtttcttggagactgagaaggcagccgacggtggcgtcgagtaccaatgccggacatcggaagtggtggtgga

SEQ ID NO: 7949 - DNA, 267 bp, Glycine max
  Clone ID: 701100543H1
atttctccctcaccttctcgctccccacacgcccctctctctcctcccatggccgaccagctcaccgacgaccagatcgccgagttcaaggaggccttcagcctcttcgacaaggacggcgatcgttgcattactaccaaggaacttgggactgttatgaggtcacttggtcaaaacccaactgaggcagaactgcaggatatgataaacgaggttgatgctgatggcaacggaaccatcgatttcccagagttcctcaacctgatg

SEQ ID NO: 7950 - DNA, 271 bp, Glycine max
  Clone ID: 701100545H1
cggtaaggtcgcgttgtgttgcgtcgtgtcgtgcgctgttcctctgtctgtcgtttttgttttgcagcccaaaccctaagctccgcatcgcaaccatgtcgaccaagcaaggtggaaaagctaagcctttgaagaaacccaagtctgataagaaggattacgacgaggttgacatggctaacattcagaagaaaaaggaagaggagaaggcgctaaaggagttgaaagccaaggcgcaacagaagggaagctttggaggttctgggctcaa

SEQ ID NO: 7951 - DNA, 256 bp, Glycine max
  Clone ID: 701100546H1
cttactctctttctctctctaaagggtttcctttgttctcttccaacttccaaggtaaccattttaatttttgagcctcattttgttgatgagaaaattaaaaatgaatatcatctggggtacttaaagtttgagactttgaacaatcttctattctgggtgttccacaatttgctgattttttttttggggtccgaaaatgaaaagaaataattgaaagatttttagccttttcgacgttatccatttgtgctaa

SEQ ID NO: 7952 - DNA, 209 bp, Glycine max
  Clone ID: 701100547H1
ccgctcgagaatcttcagtctcatcgagcgagcacaatactgttacaatgaagacacctgaaacacagggctgctgttgacttggacacccattactctcaagaatatcttgaagaatatgttggaacagataagaggagagccatcttatatcagcaatatgttaaaggtatatcaacaactgggatgcaatctaactagggttccga

SEQ ID NO: 7953 - DNA, 271 bp, Glycine max
  Clone ID: 701100548H1
ttccagttcctttcgatgatcctgccggtgattacactgtcctcattggagactggtactagctcgaccacacggatttgaagtctcagcttgatagcggtaggaagctgcctttacctgatggaatcctaatcaatggtcgtggctctaatggagcatatttaaatgtggaacaaggaaagacttacaggcttagaatatcaaatgtggggttggcaaattcgctgaacttgcgcatacaaaaccacaaattaaagctggtggaagtgga

SEQ ID NO: 7954 - DNA, 262 bp, Glycine max
  Clone ID: 701100549H1
cgcaaatgcaggcacagaagacacgtgatttttccggtggctggaagttgaggattgcattagcgcgagtcctatttatgaagccaaccattcttctacttgatgaaccaaccaatcaccttgatttggaagcttgtgtgtggctggaggagagtttgaagaagtttgaacgtattctggttgtgatttcacactctcaggactttcttaatggtgtctgcacaaatattatccacatgcaaagcaaaacactgaagctcta

SEQ ID NO: 7955 - DNA, 261 bp, Glycine max
  Clone ID: 701100551H1
cagacatattggcattcgcagcacgagacagtgtttccaaagtgggtggcataagctacgacgttccatcgggacgaagagatgggcgtgtctcgatcggcgatgaagtgctagacaatcttcctagaccatccttgagcgctgatgatcttattagtaactttgagcgaaagggtttgtcagcagatgaaatggtgacactctcaggagcgcattcaatcggtgtgtcccattgtggtgccttctcgaatcgcttatact

SEQ ID NO: 7956 - DNA, 262 bp, Glycine max
  Clone ID: 701100555H1
ctttctctctctccaaatcaaaacccatcacaattcacaacaacatacaaattgcaaatcctatcttttctcttctcatataaaagaacccttctttcgaatccttcccgctcttttccctctgatttaattcatgcgcagatccaaaccctaatccatctctccgagaaatattgtgtccacagtcaatttggactgtaagttggacctcaaaacaattgcacttcaagctcgtaatgcagagtacaatcccaagcgtttt

SEQ ID NO: 7957 - DNA, 266 bp, Glycine max
  Clone ID: 701100556H1
ctaaacctaaacctaaacataaactgaatttcccaaatccccttcacaattttcaccgaacctaatactcccaaaccaatcttcgatcatggccgccgaatcacaacctcaactaatcgaagagagaagagaggagcaagaacttaagtacctggaatttgtgcaattcgcgaccatccaggccctgatgcgctgcgccatcctctactcctacgccaaggagcgcgcgggtcctctgaagcccggcgtcaacaccgtcgaggagg

SEQ ID NO: 7958 - DNA, 244 bp, Glycine max
  Clone ID: 701100557H1
accacacagcactttccccaaatcagatcatcggaaccctaagtcgcgtattccgatcttgacccaagttcggtatggcgatcttgctgggcgaaattcttcaatcgctgtatgtgtggctgaagctgatcaagaacccgcagcctcatccctacgtgaaccctaatctggaccccgtgttgcgggtggccggtgtcggatgctccatgctgtacgccgttgacgaatccgaaggaagccgaga

SEQ ID NO: 7959 - DNA, 263 bp, Glycine max
  Clone ID: 701100558H1
ccgcaatccaaaccctccaaggtttctttcctgtgctcctcctcgcgtggtgcactacgcaccaggtttttgtagctaccaccgtgcccaattcacatcgcatgtctcgaacgctttgtgctgcaactgaaatcgaaaatcagagaaagcggagaagagagagagacgatggctgatctctttgcgtggctcatctccttcttcattcttattgccttaattgtactcgtcatttaccagttaatgtgcctggcagacctaga

SEQ ID NO: 7960 - DNA, 263 bp, Glycine max
  Clone ID: 701100559H1
agacaggacggccaaatggagttgttcttctacgcggtgttcggccgtttgggagcggttgtttgagtcacggagctgagcaagagcaacaaggaccgaatcaacacctcttccgcattcaattccttcgagaacaactacctcatcgtctattccctcatgatggctggagattggctacaaggtccatatgtctactacctttacagtacatatggatatcggaagggagacataggacaactcttcattgctggttttgg

SEQ ID NO: 7961 - DNA, 267 bp, Glycine max
  Clone ID: 701100560H1
cttttgtaagacagccaatgttaaaagctagcctatgtataatttctgatgagggtaagcactttgaattaaaatgtttcagccacacttaaaaggaaccgctcactcaccaaggatgaaattgatgcttactggaaatcaaagaagaagatagaggaagaacaccttagagctatttccaacttgtcagagactattcaggctagcaaaagcacagaacctgagaagaagttgcagaagtcaatgaccatgcctgtgacccgtgca

SEQ ID NO: 7962 - DNA, 269 bp, Glycine max
  Clone ID: 701100563H1
gcttcccgcactcctccccgcctctttcttccgccagccttatgccgccacccccgcctagcatccacacgtgtcgcgagtgcaacatcgcaggatgcctgggatgcaactttttccccgaggaacaaaggaagaaatacagaggagttaggcagaggccttcgggaaagtgggccgccgagattcgcgatcgtcatcgttcggcccgggtctggctcggtacattcgaaaccgccgaggacgccgcccgggcctatgacaaagcctcg

SEQ ID NO: 7963 - DNA, 284 bp, Glycine max
  Clone ID: 701100564H1
gctcgcaccggtcgaaccaaccaggtatgggaacggaaacctgctgatgagaagattgagataaatggggaaaacaatactcaaaaatctgaagttagctcggaagtgctcaaggagtcccttgctgagaaggatagtgatgaccacaaagttcccgagaatggatgtgctacaaaaactggagatgccccaaagggtgctaaaccagttgttcctgagagcaagattgtagccaatggggttgtttctaatggttgctaagctctactgtgtttgaaggaggc

SEQ ID NO: 7964 - DNA, 262 bp, Glycine max
  Clone ID: 701100567H1
cctctctctatgcctcaccacaacaacaacaacactcctgcaacgttaccggcttcaacaagggacgaggcatctattccaccaccaacaccagcctttcctcctaccatcctactaaccttaacaacaccgcttttcgaggcctcaacaacggaatccattccaacaccacatcctcaccctatcttaacaacaaccaccaccacctcgacgacaacaacaacctcaacagacctaatctcaagggctacaagacatattt

SEQ ID NO: 7965 - DNA, 257 bp, Glycine max
  Clone ID: 701100568H1
ccgcgagtgaactccgttgtcacccccaccgacatggcggtactctttttgagccgccaactccgccaccaagagattgcctggtcgcaaggcacgtgttctcccggacaactgcgacggcggagatggcaacatacagaagagagttcaaaacctggaagtttaagtgagattccaaggttgagtctggaaggagtcgagtcagggtttcagtgtaggttaaattattgtaggtcaaggaagcctgtcttggagac

SEQ ID NO: 7966 - DNA, 260 bp, Glycine max
  Clone ID: 701100569H1
cagcagagagcccgtcttaacaaacgctcttctctggaaactccccgttcttttccttctttcttcttctctgtctggtcttcgatcttcgatcttcgtccctgaaaatgacagagtgcatttcaatccagatcggccaggccgccattcaggttcgaaacgcctgctgggagctttactgcctcgaacacggcattcagcctgatgggcagatgccaagtgactagaccgttggtggaggtgatgatgctttcaacacc

SEQ ID NO: 7967 - DNA, 253 bp, Glycine max
  Clone ID: 701100570H1
gtcaggatgtccaaaaaagctggatggggtgtcatggcgagtcacagaagtggagagactgaggataccttcattgctgacctttctgttggtttggcaacgggtcaaattaagactggagctccatgcaggtcagagcgtcttgctaaatataaccagctcttgagaattgaggaggagcttggtgcggaagcagtgtatgctggagctaacttccgtacccctgttgagccctactaaagttttcaagtgg

SEQ ID NO: 7968 - DNA, 259 bp, Glycine max
  Clone ID: 701100571H1
cccttatctctctctctctctatctctcccgaattcttgtccgttcgacccttttacttagtattcctcgtttccggtattcgctcccttttttctgcattctggttttacttagatctctgtcccgcaccagatctggtgcagggtgagagtgttgggttcattaattttgtatcaatcttccttctgagcggtaggcgtggggataccagagtcttttcgggaagcaagagagggttctctccgttttcaatagatc

SEQ ID NO: 7969 - DNA, 261 bp, Glycine max
  Clone ID: 701100573H1
ccttcttacaatttattatctttctctaagaactcttccaattttttctctctcttcctctttagcttcatcgccatggcatcaccagcaagaaccttctttgccttcattctcgccgtcgtcgctctcttcttcgccgccgccaatgctcaagacctctccccggctccgagtcccgatgccggagcggcgggatccgtttcgagctccgtcgccatgatcggagcttcggttgtgctgtcattgatggctatcttgaag

SEQ ID NO: 7970 - DNA, 262 bp, Glycine max
  Clone ID: 701100576H1
acggaggagaacaagattgttgatttcatcaaatttgatgttgggaatgtagtcatggtgacgggtggaacgaataggggtcgtgttggagtgatcaagaacagagagaagcataagggaagctttgacactatccatgttcaggatgctactgggcatgaatttgcaactcgaatgggcaatgtgttcaccattggcaagggaacaaaaccgtggatgcctcttcccaagggtaaaggtattaagctatcaatcattgagg

SEQ ID NO: 7971 - DNA, 264 bp, Glycine max
  Clone ID: 701100577H1
ccttctgacgctcgcctcacctctctctccgaaatccccaaattgcctgtgaatgctagaaaaccctaggcacgttcgatttgatgctctcccatttgcaatcaagggcgagcgcattcggttcttgcacgcaaggctggtactaccgctgcatcggcctcgatccctgaattcatcattctttctcgcaccatctttttctattccgattcgatttgttgttgttgttgttgttgttgtgtttttgcctccttcctcgacgaa

SEQ ID NO: 7972 - DNA, 224 bp, Glycine max
  Clone ID: 701100578H1
ccttgaactcaccaacaatcttctcctactaccaataacaatgattgttctcctaatagccaaaactgttggagacagtttcaacccaagcatctatgagattatactgcacttgaaaggccttcctttcattgatgcaaatcctgagccatggatgagaaatctcactgtgggtgagcttgttgatgtatagccaccagtggtcaccctcaatggagtagaaa

SEQ ID NO: 7973 - DNA, 204 bp, Glycine max
  Clone ID: 701100579H1
cggctcgaggaaaatgtgtggaatatttgcgtatctgcattacgacgtgaacagagacagacgatacatcttgcaggtcctcttcaatggcctcagcagattggagtaccgtggatacgattccgcaggcatcgcgatccacgattccaatttctctccccttgttttccgtcaagaaggaaacattgaatcgctcgtcaaatc

SEQ ID NO: 7974 - DNA, 261 bp, Glycine max
  Clone ID: 701100580H1
cttcaacgagctcaaagaaaccaataagctcgttgtgatagatttctcggcgtcgtggtgcggccttgcaaattcatagagccagcgattcacgccatgtccgaaaagttcaccgacgttgacttcgtcaagatcgacgtcgacgaattgccggatgtggcgaaggagtttaatgtggaggcgatgccgacgttcgtgttgtgtaagaaagggaaggaagtcgacaaggttgtacgggcaaagaaggacgagctcgaaaag

SEQ ID NO: 7975 - DNA, 252 bp, Glycine max
  Clone ID: 701100583H1
cctttctttattctctccttcctcttccttcttcttgcctcatctgccactgcttgtgatcgctgcttgtatcaatccaaggcttcctatttctccaaagcttctgctctttcatctggggcatgtgggtatggctctttgacactagacataagtagtggacaccttgcagctggtgtggattctctcttcaaaaatggagcaggttgtggtgcctgctttcagataagatgcaagaacccaactctatgt

SEQ ID NO: 7976 - DNA, 256 bp, Glycine max
  Clone ID: 701100585H1
atccaacacactcttgtcttgtgattcttcttcttcattctccctttttttgccctagattagatcctttctcttccaatcattaattaattagattagatttgatttgatttgatttaccttaatccttcgtcttgtttttccttccctcaactccaccattcctgatttttctgcatcagtctattcaagttcattgtagggtgtatatccttgattttgtgtgggtttgagttagggtgcatgtgaatgaaaa

SEQ ID NO: 7977 - DNA, 257 bp, Glycine max
  Clone ID: 701100586H1
caattttaatggcttgttcatcatccgattcataaaaaccagtgacgtcgctgttgttcttttccttcctaattccgataccttccgattctctttccgccctacgcatactatatacttgttcatctctctctttctcaaattccgattcctttttgtagcatacacaccgtactagcccaactaacaaaccaaacaaaaccgttaccatgggaaaacgtaattctcaacgtaaaagtgctgcgatgttcgatagt

SEQ ID NO: 7978 - DNA, 260 bp, Glycine max
  Clone ID: 701100587H1
ccacgcctctcgtaatcctcttcctcttcctcttcatgttctcggagctccggctccactagcggagccccggctcagttcaaacccattttccaacacaacaaaaaaatgataactccattttctctcttccctttcgagatctcgaaaatgtccaaaccctgggccaaggctggcgttggatccgcctcgaggcgatggtttgggtgaatgagtctccggtgaaggcgatggataaggcgaatccgtttggcgcggcg

SEQ ID NO: 7979 - DNA, 261 bp, Glycine max
  unsure at all n locations
  Clone ID: 701100589H1
ctcgagccgccctatcttctctcttgtcttgattccattcaatttaaaccttcagngcgtggcgactttcaacctttttcgagcacccattaacattaacatggccattccctacccccatttcatcgccaccgagaaagccgccatggacgccggcctcctccacccctcctccccctcctccgtcatcctcacccaagacgacctcaagaaaatcgccgcctacaaggccgtcgagtacgtcgagtccggcatggtcct

SEQ ID NO: 7980 - DNA, 251 bp, Glycine max
  Clone ID: 701100590H1
cgcatttgcactgtttgtaggtgtctccgtcgcagccaagatctcgggtggccatttggacccagctgttacttcttgattggccatttgaggcaacatcaccctcatgactggtttcttatactggatcgcccagttgtcgggttccattcgggcatgcctccctctcaatttcatcagcgccgagagcattccaagccatgcaccggccactggtgtgaacgatgttcaagctgtagtgttccagattg

SEQ ID NO: 7981 - DNA, 255 bp, Glycine max
  Clone ID: 701100593H1
atcttcatccttcatcggcattgcgcttcacaaattctcagtctacgacttggtggatttcataaagttgtgataaacatgggaaaagactcaaagccaaaggagtccggaggcaagggaaaggggaaacaggctgcaagtggaagtgatgagaatgcttctaagggaaaaggaaaaggtgggaaaggtggagatgggcttggtacttgcacctatgtcaaagctaggcatatcctatgtgagaaacaaggtaag

SEQ ID NO: 7982 - DNA, 177 bp, Glycine max
  Clone ID: 701100594H1
acgcaggcggattctactgggatgtttatttgcccccacaccggggttgctttaactgcattggttaaaggccaggaccagcggggttattaaggccactgataggactgtggtggttagcactgctcatggcttgaagttcactcagtccaagattgattaccattctaaggacat

SEQ ID NO: 7983 - DNA, 291 bp, Glycine max
  Clone ID: 701100601H1
ggaaagttctgggaaaacatgccaagaacattatgctcatgtctaaggttgaaaaccaagaaggggttgcaaattttgatgaaatccttgcaaattcagatgcatttatggtggcacgtggtgaccttggaatggaaattccaatagagaagatatttcttgcacagaaagtgatgatttacaagtgcaacatccaaggaaaaccagttgtcactgcaacccagatgttggagtcaatgatcaaatctcccaggccaaccagggctgaagctactgatgttgccaatgcag

SEQ ID NO: 7984 - DNA, 299 bp, Glycine max
  Clone ID: 701100602H1
tacggctcgagatcatcctgcttctagtgctcttccttgtcacccaacttggtgtggtgtatgctattcatcatcatcatctaagatgctgagaaaactcatgaggctgctactgctgctgatgttctttctgtgtttctcatatgttctctctgtctctgctattcctgcaacaagaacccaaaatttgaaaggcgaagaagaagaattttcagccctgccttctttaactaggttggatcatgtggttggaaatggtgaggtggtgctcgttgacatgaatgaaggattcatggaga

SEQ ID NO: 7985 - DNA, 283 bp, Glycine max
  Clone ID: 701100603H1
ctcgagccgaacaaccttctttctttttctgtgagcctttctttcaggttcttaacttgatcagtgtgcagtgtccaaatcataagggtagttgcaaattgcaatggctaagcatgatgttgagggtggttccttctctgcaaaggactaccatgatcctcctccagcaccgttgattgatgctgaggaactcacacagtggtccttctacagggctttgattgctgagttcattgccacaatgctcttcctttacatcacagtgctcactgtgattggttac

SEQ ID NO: 7986 - DNA, 271 bp, Glycine max
  Clone ID: 701100604H1
gagcgattcggctcagtcacgcgcgtcgccgtttaactggaaactaaaacgcctcctcaacataggatcacgcgaagaaactgagagaaacaattaacgtcgtaaacgacgtcgcaaaagagatgataaagcagagaagagaaatggggttcaagacgcggaacgaccttctctcgcggttcatgggatcaatagacgacgacgtttatttaagagacattgtggtgagttttctattagcgggtcgtgacaccatcgctgccgggttaac

SEQ ID NO: 7987 - DNA, 285 bp, Glycine max
  Clone ID: 701100605H1
caacaacaaaaaaagacaaaaactacttccttctctcctttgctgtgttttctttctcaaaaatgggtcgtacctatgttcttatgatggttgctgcattgttgttgagctccaccatggctcaatctccagcttcgtcgccggctttgtcccccaccacacgccggtggccactccacctaggagggcgttgtcgccgtctccgtcgtctgtgtcaccagcggcttcacccgccaccggaaattctcctccggcaccacctacttcttctccttcggaatcgcc

SEQ ID NO: 7988 - DNA, 291 bp, Glycine max
  Clone ID: 701100606H1
tcaaaactgaccctgattgcgttggttgttgcggccctgtgcgccgttgatctaacccagagagcatcatcatcatcatcatcccctcacgcgccagcgccctccgtggactgctccaacctggttctcaccatggccgattgcttgtccttcgtcacaacggcagcaccatcacaaagccagagggcacatgctgctctggtttgaaagtctgttcgtcaaaaccgctccggcggtgtctctgcgcagctttcaagagcatagcgctcaattcggcgtcgttttgaatgt

SEQ ID NO: 7989 - DNA, 232 bp, Glycine max
  Clone ID: 701100607H1
gttttgttctcattctgtgactctgtgcttagttaacgttaacagtgacttaagatggcggattctgcagatgtcacccacgatgttgtgtccctcttctcttctcctcaaagggactttcttcttcgaaacaacggcgatctcgttaaatttgccattttaaaggtcacaaactgggttggaattttccggcatcctggcgtggtctatgtcaaacatttacgccaacttt

SEQ ID NO: 7990 - DNA, 290 bp, Glycine max
  Clone ID: 701100609H1
ccaaggccgagcccgagaaaaagaaggacggtggcggcgagaagcccaaggccgagcccgagaaaaagaaggacggtggcggcgagaaacccaaggccgagcccgagaaaaagaaggatggtggggagaagcccaaaggggatgctccgaaaaaggaagcgagaagcccaagcccgggcccgagaagcccaaggacaagcccgcgccagctcccttacccgtgcagccacatatggctgcacctatggcggttccagttgggatgctctatgctcctcctccgtgctacg

SEQ ID NO: 7991 - DNA, 284 bp, Glycine max
  Clone ID: 701100610H1
tgtggaatcgatgacttccggaaaatgcctaatggtgtcaatggtattgaagacagaatgcatttggtatgggatatcatggtggaatctggccaaatatctgtcactgactatgtcaggataacaagcactgaatgtgctaaaatcttcaatatatatccaaggaaaggagctgttctcccaggatctgatgcagatattatcatcctgaatccaaattcgagctttgagatgagtgcaaagtcctcacactccagactggacacaaatgtctacgagggaag

SEQ ID NO: 7992 - DNA, 276 bp, Glycine max
  Clone ID: 701100612H1
cggctcgagcagccttgaacttgaactatcgtgtcttcttggctttctctgttcaggatcaacatggatattgtatcacgagctttgctatttccgttggctatacttgtgctcatattaagcacaccttgctcaggtgcttttgggaagagtggaataatgtgaatcacacctatttttctgtcccccaagtttgaacttggaccaggatcggtagccaataaatatgattatgacgctgatttccaagaggtcatatagcattaagagtttcaa

SEQ ID NO: 7993 - DNA, 262 bp, Glycine max
  Clone ID: 701100613H1
ctcaaaccaaggacaaatcctagagtttctcctttggttgaaagagtaggacctgtgagtgtcacaaacatgggagaggagaatgttaaacaaccgttgttggcgaggaagtacttcaaggactgcccaggttgtaaagtggatcaagccagagagttgagtgagggaaagggtgtacctgttaaaaatctttttatcatgtggtaggtggtgctgtgtgctgcactgcctataccatctctgtttccattcctctatttca

SEQ ID NO: 7994 - DNA, 286 bp, Glycine max
  Clone ID: 701100614H1
taacaagctagctattagttcgattttgtagtaagtgaggtgccaatatggtgaagatagctcttggtactttggatgactcttttagcgctgcctctcttaaggcttatttcgcagagttccacgcaactctgattttcgtgttcgctggtgttggacagccatcgcttacaacgagcttacaaaagatgcagccttggatccaacggggctggtggcagtagctgtggcacatgcatttgcactgtttgtaggtgtctccgtcgccgccaacatctcaggtggc

SEQ ID NO: 7995 - DNA, 291 bp, Glycine max
  Clone ID: 701100615H1
atcgggaagcaaaaaaaatgagaatccatcacatagcatgcctccaagacaattattcctatctgatcgtagacgagagcacgaaggaagccgcggcggtggacccggtcgaaccggagaaggttcttgaagttgccagctcgcacggcctcactctcaattcgtcctcaccacccaccatcactgggatcatgctggtggaaacgacaagataaagcagctggtgccaggaatcaaagtctatggtggttccattgaaaacgtcaagggttgcactgacaaagttgaaaa

SEQ ID NO: 7996 - DNA, 289 bp, Glycine max
  Clone ID: 701100616H1
gaagaacccaacccccaatccaacccatttatgtcttgaatgtagaaacttgatttaggacaagctcaagagcattccatcagtatcttgagccccaaatggagaacacctggatcctgagttttcaccttctcctcctcctgctccatccatatgcagcacaggggccatcagtgttggtgttggtgttggtgtgggtgttggtgttggtgttggcattggcattggcaacagcccaggcccctctggctccactggatccaacctgaagaatgccttcacagcactc

SEQ ID NO: 7997 - DNA, 287 bp, Glycine max
  Clone ID: 701100617H1
cagagcaccatttcgagtccaaggcagacgccggtgcctccaaaacctaccctcagcaagccggtacccttcgcaagaacggctacatcgtcatcaaaggacgcccctgcaaggttgtggaagtctcgacttccaaaactggaaagcacggtcacgcaagtgccactttgttggaattgatattttcactgccaagaaacttgaggatattgtgccctcttctcacaactgtgatgttcctcatgtgaatcgtactgattaccagctcattgatattgctgaggatg

SEQ ID NO: 7998 - DNA, 287 bp, Glycine max
  Clone ID: 701100618H1
tgccatttcaatccccagtttcttcttcaacgtcctcttacgagcagatcccaattctccttcccagtttcaaaccctaattccctcattcccatggcctcagaagagcccactgtcgcggtggaacccgctcccgaacctgccaccgccgagcctcccccggaggagaaggaggagcccaaacctgaagccaaggctaagaaaaccaaggaacccaaacctaaaaaggtttcccagacacgcaaccctcccactcatccttcctacgaggagatgattaaagacgc

SEQ ID NO: 7999 - DNA, 275 bp, Glycine max
  unsure at all n locations
  Clone ID: 701100619H1
ctcgagccgatttcattttctctttggaataacctgcagggttgcttccatttcacattgtatacagngntctttgttgtnttcatttctgacaagttctttttttttgacgcgttgcaaaatccttctcctcgaggcggcggcatggaaagcttgtcgcgcactgaagcgcggcatctcgcggcagttctcgtcggggtcgctgcggaggaacctctcgtggcagttcacgcgccaggcctcgctggatcctcgccggaacaaccagcgcttca

SEQ ID NO: 8000 - DNA, 282 bp, Glycine max
  Clone ID: 701100621H1
ccctcgagccgaatcggctcgacggctcgagcttggggtggttgacagttttaaacttttcttgattcgattgcaagtctcgtcttgaatgaatacttctaagaaaagggtgcctttaaactttttgaacgcttcttcttcttctttgtcatgtatgtatctctgcacttgatcaacaggtactgcctcgtgtcattggatgtgtgaatttctgaactcatttcacagaggtcatgcattattctgctgcttctctttgcatccaagacctggtgtcgattt

SEQ ID NO: 8001 - DNA, 288 bp, Glycine max
  Clone ID: 701100624H1
ggtgaagtaagagtgtggaattggatagcggaggcaactactaccacccaataaagtggcacttacaatgtgttccatttaattgttttactagtttttttttctggtcttcctttttgtaattttttagctgcaagaagggaattcgggctgaggttgggattgggaaaagcagataaagacaggtaacgggagtgtgtaatttaagtttgcagaaaaagagaggggaatctgagctgtggaagtatccttggcacaaagctgtgctcaagtaggcgtgcctattaa

SEQ ID NO: 8002 - DNA, 258 bp, Glycine max
  Clone ID: 701100625H1
tagctgtagctccgcgctcgagaagaaagcggtggcggtgccacacctgttccggctgcggcagaggaaaccaaagctcttgttattgtggagaaggagaaggagaatgagaagataccagaacctgtaaaaaagaaaggcttaaggtgaatccctgataggaaaattgtcttggaggaattagagaaagagaaacgattgtctaatgtgaaggcttgggaagaaagtgaaaaatccaaagcagagattaaagcccaa

SEQ ID NO: 8003 - DNA, 182 bp, Glycine max
  Clone ID: 701100626H1
cctcgagccgaatcggctcgagggcaagctacaattatgggtcctgcagacagtccctatgctggaggtgttttcctagtgactattcatttccctccagattatccctttaagccacccaaggttgcattcaagacaaagtgttccaccaaatataatagcatggaagcatttgcttgata

SEQ ID NO: 8004 - DNA, 159 bp, Glycine max
  Clone ID: 701100627H1
ctttgtttgttgatccatctcttgtttcttgctttctttcttcaccatgtcacttgctgggaaaatcaccactgaaatcggggttcatgcaaccgctacaaagtggttcaacctcttcgcaacacaactccatcatgttcaaaacctaactgatagagt

SEQ ID NO: 8005 - DNA, 281 bp, Glycine max
  Clone ID: 701100628H1
gttgtgcgcgacaaattaagtgagttacaacaactgggggccacagaaaaggaaattaaagaggttatgaaggacttgggcattagcagggcaaagttatatggatggccaaatacatatgtattcaccaaggcaatgggagagatgcttgtggacaactaaaaggaaacttatccgttgtgatcattcgtcccagcattgttaccagcacattaaaagaacctttccctggttgggctgaaggtgtaagaaccattgacagtttagctgtagcttatggg

SEQ ID NO: 8006 - DNA, 284 bp, Glycine max
  Clone ID: 701100629H1
caatctctcttcttacccatttcctccccccctctttctcttttcttgttctgtttttattttcactgttctctgataacaacgttgttagttgtcaccatggttgttctgtctcagccagcattaaaccagtttttccttctgaaaacatgcaagcccacgcccttgttcgcggggattcctgtggtcgacctcacggaccccgatgccaagacccacatagtcaatgcctgcagggacttcggcttcttcaagctcgtgaaccacggtgttccgttacagtt

SEQ ID NO: 8007 - DNA, 288 bp, Glycine max
  Clone ID: 701100630H1
tttctccatttccattttctctctcacttttcaagaatcgtaagctatgggaaagtcttacccaactgtgagtgctgattaccagaaggccgttgagaaggcgaagaagaagctcagaggcttcatcgctgagaagagatgcgctcctctaatgctcgtttggcatggcactctgctggaacctttgacaagggcacgaagaccggtggacccttcggaaccatcaagcaccctgccgaactggctcacagcgctaacaacggtcttgacatcgctgttaggcttttg

SEQ ID NO: 8008 - DNA, 287 bp, Glycine max
  Clone ID: 701100632H1
caaaatttggcatacgttcttttgcaacacgtttaggtaaaaaaaaggtattttggatttgtgtttccctattcgaagtggcttttggagttgtcctcctcgcaggagcatcatcttcttctcccctctggattaaaattattacgggtctaggaagtttattcctgctacaattctctggtaccagaccaaatatgtagatttgtcaagtccagattcgaccagatccttctatatgctgaactggaagttgttgaacgtagcattcttgttcctgcctttaatta

SEQ ID NO: 8009 - DNA, 285 bp, Glycine max
  Clone ID: 701100633H1
gccaaattcgatttcagagttcggccatggcgctccgacacgactgcagaaaaatttccttcgcagctctcagcgtcgagggccaatcggatccaacggaacgcaatcacaagaagcgcaggcaccgcgcttcgaagaagaagaagaaacttctcgatcgcgccggcgattcctttgatccgcattcggtgccgttggagaacggaggatcatgtaacggattcgagctcgacgctagcatgtatcctgcggcggcggcggatgaagcttcgtcgtgtgcgagga

SEQ ID NO: 8010 - DNA, 284 bp, Glycine max
  Clone ID: 701100634H1
cctcgagccgcggctcgaggtattttgaacgtctctgccgaagataagaccactggccagacaaataagatcactatcaccaatgacaagggtagactgtcaaaggaagatatcgagaagatggttcaagaggctgagaagtacaaatctgaggatgaagagcacaaaaagaaggttgaggccaagaatgctttggaaaactatgcatacaacatgaggaacactgtgaaggatgacaaaattggtgagaaacttgatcctactgacaagaagaagattgagga

SEQ ID NO: 8011 - DNA, 280 bp, Glycine max
  Clone ID: 701100635H1
cctcgagccgctcgagcggctcaagcgctcgaggactgatattcagcggaacagcatccgtagttcttgcacgactagttgcatctctgaagctggttgggggtaacttagctgatcacagattcttattccttggtgctggagaggctggcatggcatagcagaactcatagcacttgaaacatcaaaacagacaaatgctccactggaggaagtgcgcaagaatatttggctggtggactcaaagggattgattgtcagttctcgcaaagattcgctc

SEQ ID NO: 8012 - DNA, 251 bp, Glycine max
  Clone ID: 701100637H1
cgctcacactcactcatttgcaaagaaagagagagaaatggcactgagggcagccgtgctccgccacgttcgtgtgccactccaagccgctccaaaactgcagccatggcgtgccatgtcatcacacggcgacgatcatctctccaaagaggaggtcgtcgaaagagtcctcgccgtcgtcaaagatttccccaaagtcgatccttccagggtgagtccagatgtacatttccagaaggatttgggtttgg

SEQ ID NO: 8013 - DNA, 246 bp, Glycine max
  Clone ID: 701100638H1
cgagatagagaacagatagagataacactaggcagcacaagagaatggcgctgctgtgtggttcaacttccgtgactccattcctttctcacaagaacgttggtttcacaacctcagcaaaatcttcctttgttggctttcaattgccgcttcaaagctcacattatcttcttccgttcgaacccttctgccggcaacatcccgtgtccgttgccagcaagagtctactactgttacccctgtcgc

SEQ ID NO: 8014 - DNA, 285 bp, Glycine max
  Clone ID: 701100641H1
gctgcacgcgcttcgttcacatacaagaacagaacgacgtcgtttgcccgcgctgccacggcggcttcgtcgaaaaggtcaccgccccccaatcgtcaaggcaaggcttccgccgccgacgccgcaacgccgggaaccactcggcgttcaacccggtgatcgtgctccgcggaccgggagaggacgaggagagcagctttgagttatactacgacggcttcgacggcgaggggctccgccgctgccatccaccatgtcggagttcttgcttggatcgggattcga

SEQ ID NO: 8015 - DNA, 275 bp, Glycine max
  Clone ID: 701100642H1
cagacatgaaacctctcagccaactgctggtattatttcaaatgtcaccggccctggatcttcaagaacactgattccttctcagaaacctggtttgcttggacctcctgtcaagcatgatggcaactctgttgatcgtgattatgacatgagaaaggacttttaggcatgaggcatggtccagtcataagaggtcaaatttcagctgaacctcctctgatattgaggccacctaatcaagcatcaccatctttgatgcagccatttggaggtgg

SEQ ID NO: 8016 - DNA, 283 bp, Glycine max
  Clone ID: 701100645H1
ctcaaatattcattttgtcaccaatcacatctcatttttctaaattcttgtttacacactctcattaatttattacattccatattgtaattaattcttcgtacgtatccatgaagagacagagagatttcaaggggtttgagagcatagatttggcaaattgtctaatgatgctctctcatccccaacaaaatgagaaactacttcaaaaaaaaattgaggctgtggaatttgagtgcaagacatgcaaccgcaaattctcttcctttcaagcattgggtgg

SEQ ID NO: 8017 - DNA, 283 bp, Glycine max
  Clone ID: 701100647H1
gcataattcaagagctgcatgctaggtggggaaacaggtggtcaacaattggaagaagcttgccaggaagaactgacaatgagataaagaattattggaggactcacttcaagaaaaagatgaaaactccatctgatgctgctgagaaggcgagatccactcctcgaggagacagcattttcagcagcaacaacagcagttgaagcagcagcagcaacaattccaattcaacttggacatgaaagggatcataaacttgcttgaggaaaatgaccatagagtg

SEQ ID NO: 8018 - DNA, 284 bp, Glycine max
  Clone ID: 701100648H1
cagacatgaaacctctcagccaactgctggtattatttcaaatgtcaccggccctggatcttcaagaacactgattccttctcagaaacctggtttgcttggacctcctgtcaagcatgatggcaactctgttgatcgtgattatgacatgagaaaggacttttaggcatgaggcatggtccagatataagaggtcaaatttcagctgaacctcctctgatattgaggccacctaatcaagcatcaccatctttgatgcagccatttggaggtgggttggtaga

SEQ ID NO: 8019 - DNA, 281 bp, Glycine max
  Clone ID: 701100649H1
ctcaaatccaagctcgggaacagagaaggagaaagagaatggacgccattgattctgtgttcgatccgttgagagaattcgcaaaggacagcgtgaggctcgtgaagcgctgccacaaacccgatcgcaaagaattctccaaggttgccgtgcgtaccgcaattggtttcgttgtgatgggattcgtgggtttcttcgtgaagcttattttcattccaattaacaacatcatcgtcggatctggttaggatgaagggtactacaatcgcctcaggaattca

SEQ ID NO: 8020 - DNA, 276 bp, Glycine max
  Clone ID: 701100650H1
ctcgagccgctcgagccgctcgagccgattcggctcgagtcgagccgattcggctcgagacccaaatcacgctaccttctctacctggggctcacctgctggaaaattagatacggccataaatggagaagagctgaataagctgaggaatctgcttcctttggatttcgaagcagcagtagtcctctaacaaaggcttcaaacaaaatttcagcaaatgttgatgatgagccagatgtgtcttgggttaactcacttgtgaaggatgctccacca

SEQ ID NO: 8021 - DNA, 276 bp, Glycine max
  Clone ID: 701100651H1
aacggatccaaactcccttggatgttactcgtatgatttagttggaaaaccactcgatgtgtatgacaagcttcgtgcacctttgggcaatctattctttgggggagaagctgtaagcttggacaatcagggatctgtgcatggagcttactcagctggggtcatggctgcagaaaattgtgagagctatcttttagaaaaactaggccacgtggaaaagctatctctagcttctgttaggcatgaaatgcttgacactcttatacctcttcagat

SEQ ID NO: 8022 - DNA, 276 bp, Glycine max
  Clone ID: 701100652H1
acctttttcaccttccccctttgtttctcaacatcattctcctcattcccctacctacccccaattttcccttctgtatttctctttttcaattctcgatttcccttctcccttttgtgtcttcataatccagatcctctcttcgatctagggtttctggcttaattaacaatcaaatgtttaaggaagaatttctatgacgattcgcaaccccatgcgacgaattcgtctcctccactccttctccgtcgtcttcctctactggttctacgtttt

SEQ ID NO: 8023 - DNA, 275 bp, Glycine max
  Clone ID: 701100653H1
ctaacaccttcgtttgatagatctgtcataagagaccctttggggatcggtgagatttacgcgaagtcgtggacgagcttcggtggagccaccaatgaccgaagcttgaacgtgtgggataccctcggtggaaatcaaacagatttggttaaaggattgtttgagttgacaccgttggatatcaagaagctgaagaagttagcggagtccaagtttgttgtcggagacaacaagaagaaagttagggtgacatcatttacggtcacgtgcgctta

SEQ ID NO: 8024 - DNA, 280 bp, Glycine max
  Clone ID: 701100657H1
aagtaacgcaaaaccgaaacgctcaacattcacattgtaaaactcttcatcatagcaattcccttccttttctccctccctctctctcttggcaatccctttcttcttcgctgtcaggtgcaccttctataataacagtaagtcagtggtgggagttatcagaaatagatgaaacagcagttataaatttataatgtctggactgatcgaaggacttcctgacgctgttgcaattaggtgccttgcacgtgttcccttctacctccacccagtgttagag

SEQ ID NO: 8025 - DNA, 280 bp, Glycine max
  Clone ID: 701100658H1
ctcgagccgtgatgatgaccttgatctctttggcgatgagactgaggaagacaaaaaggcagcagaggaaagggaggctgctaagaagtctaccaagaagaaagagagtggcaaatcttctgttctgcttgacgttaagccttgggatgataaacagacatgaagaagctggaagaggctgttcgcagtgttgagatgcctggtctattgtggggagcatccaaactggttcctgttggttatgggatcaagaagttgcagatcatgttaactattgtcg

SEQ ID NO: 8026 - DNA, 274 bp, Glycine max
  Clone ID: 701100659H1
gatcaattggccgccaccgtcaagaagttaagtcgagactttgccaagttggagacatttaagaaacaactgatgcagtcgctaactgatgacaatgcatcgcatgctgaaaccatagatattggaacctgtgatcaatcagttccaaaggcatatcctgataacgatgatgatggaagtggctatatggtacatcattcatacaatggccctgcagatgtgggtaaaacaaatgatgaagcttccaggtattcagggcaaaggttttctttga

SEQ ID NO: 8027 - DNA, 267 bp, Glycine max
  Clone ID: 701100660H1
caactgtgcaagggagtgttgccattgatggcaaggctgtgattggcaccattgatgaggattttgtgtgtgcaactttggattggtggcctcctgagaaatgtgactatgggagatgcagttggggccttgcttctcttctcaatctggacctcaacaacaagatttttttaaatgctgtgaaagcattttcaccgttgaaacttagattaagtggaagtttgcaagccaagctaatatatgggcctgaagttaatccccaacctt

SEQ ID NO: 8028 - DNA, 282 bp, Glycine max
  Clone ID: 701100661H1
gtcacacacggaaggtccgaaaatctataccatagcaatacctccttctagcattggtcagaaatttggacaactgctggaaagtggtaaaggcagtgatgtaaattttgaagttaatggtgatatttttgctgcacataaattggtactacagctcgttcacctgttttcagagcacagctttttggtcctcatgaaagatcagaatacccagcgtattaaagttgaagacatggaggctccagttttcaaggcattgcttcattttatatactgggactc

SEQ ID NO: 8029 - DNA, 282 bp, Glycine max
  Clone ID: 701100662H1
ccggtaccccgagaaacacgcgtgtggcttcgatttcaaggcggtggggagagaggagatagcacgggcgaatcccgtgatcaaaggcgagaagctacggaggatttaatctgcaccgttgatatgatgatcgaagcgattagggtgagttgatcaggaccgtccgtcgtgggccgttgatacgaacctatttcgagcgtgtgtaagacaaaaaaaatctattagttatgacgacattgggaagggttgaataagtcatattttggaggctttgctttgtgt

SEQ ID NO: 8030 - DNA, 284 bp, Glycine max
  Clone ID: 701100664H1
atcacgaatgaaaaagatgaccctgaaaatgcatgctcccctgacaggtctagccaagaagttgttaaatctgctgaagtggagcatgataaagaggaaatgggggcacagataaaagagattctatcggtttgtcctactgaagaaagtttcagtagcatatagcatattttctccagcatttcatacccgtgttcttatatacagtcttccaagtgagtgtttctacagtacttggcagattttgattgtagtaatagtcctgtgatcgtcatagaccgttt

SEQ ID NO: 8031 - DNA, 275 bp, Glycine max
  Clone ID: 701100666H1
cggctcgaggtgtgtccaaccatcaatctttcattgattatacgggttctctgtaacttcactccggatgagttctgtccagatcctgttccaggaactgtcttggaggccctgaatgcagagactattatagagcgaagattgtcagcagaatctgcaagaagctttccctatgtggctgagcccgttgtgtatatggctccctcttctgctaatgtggcagagaaagttgcagaggctgcaggaaagtctcacttggcaagacatgtatcagc

SEQ ID NO: 8032 - DNA, 271 bp, Glycine max
  Clone ID: 701100667H1
gcagtggtgactgaagatggccagcagattgcctatgactatcttgttattgccactggacacacagaaccaatccccaaaaccaggagtgaaagacttgaccaatacaaaggagaaaatgcaaagatcaaatctgcaagttcagtttgattgttgggggaggtccaactggtgttgagcttgcagcagagattgctgttgattttcctgataagaaggtcaccatagtgcataaaggaacgaggttgcttgaatacattgggacaaaagc

SEQ ID NO: 8033 - DNA, 274 bp, Glycine max
  Clone ID: 701100668H1
ccctcgagccgaatcggctcgagcatcaaacaaggtgccatcatgagcagaaatataggcaataatggatttgtggttcccacagcttcaattttcactcttgcagccgttgggatgatactttcagtgaccatctatgacaagctcctgtgccagtgctaagaaaactaacaggaaatgacagaggaatcagcatcctccaaaggattggtattggaatggtcttctcagtcatcacaatgatagtggcagctttggtggaaaaaacgaggct

SEQ ID NO: 8034 - DNA, 275 bp, Glycine max
  Clone ID: 701100669H1
ccaccaccactccctcactctccactccctcaattcacaatcctcacgttgcctcgttcacatgaaactcctctcgccctccgtgttctcgctctctctctgaatcactcatccttataataaataaataatttctcgaagaaggagaagaggttttcattgttgtggttgttgtagaagaagaagaagctgaagaagaatggagtccacagaatcttcatacccgtcttctcccgagggaccgaggaagcacgctgcatcgcctcctccgaaat

SEQ ID NO: 8035 - DNA, 276 bp, Glycine max
  Clone ID: 701100670H1
gcagaccagttagggtcagtctctgtaacaaatgaggtcctggagaggagtcaattaacaagagattatgttctggaaccaattattatgaattccaacatcaaaattccactggtgatccaagacctaattaagagcacttcggagggattatagaaaggctgtagacctattcaatcttcagagggatcaggaggagcttatctcatgcaagattcttctggcttgaagtatgtgtctgttttcaagcccatagatgaggagccaatggcaata

SEQ ID NO: 8036 - DNA, 279 bp, Glycine max
  Clone ID: 701100671H1
gtgattttttttctttgttagactctttgctggtattttatgattagaggcagtcttaaaggaatctcaaaatttaagaaaatatagttcatgtaggcatgataagtagcagaggcagaagaatgtttttttatttgttttgtgaaagatttggtgtctagaagtagaaactgagagaaaggccttgtataaggatccttacacgcatgaaatgaattttgagctctagcttctaggcatagatattcttaattcttagtttaaactttgtatgtatca

SEQ ID NO: 8037 - DNA, 281 bp, Glycine max
  Clone ID: 701100672H1
caaaaagggccagaaacttctcggtcgcatcatcgcgttcagcttcagccatggcggcctagcctaattaattcaaaagtcaaaaccctaaatcccaacccatcaattttcctctctcttcactttaccaatccaaatggcctctagactcccctccgcttcagatcccatctcctccgcaccgcctccctccttcaaaccttgccgccggcgcccctctccctccaccgcctcctctccacttcccgccgcgcgcctccgcgctccaaaaaatcagtcga

SEQ ID NO: 8038 - DNA, 279 bp, Glycine max
  Clone ID: 701100674H1
ggctttgcagttgggccaggacgcatatagtccctatgagcttagaagtcaaagatgtcagatgtgtttgcgttctgatcctctgcataaagtgatggaacgcttggcaaatccaggtgtcaggcggcttgtcatcgtggaagctggcagcaagcgtgtagaaggcattgtttcattgagggacatattcaagttcttcattggtgattagttttggattggtgaatggaaaagtacaatggtatgtgctgtggttatgatactagagcatccatacaa

SEQ ID NO: 8039 - DNA, 170 bp, Glycine max
  Clone ID: 701100675H1
tgatgatcagggaaatcctttctggatgctggtccgtaacttgcttaaaacgccaggcaaggaacaagtagactgtcaccacccaaagcccattttgcttgatactggcgaaatgaagctaccatatgattgggcgccttcaatacttccatccagatcctccgagttgg

SEQ ID NO: 8040 - DNA, 204 bp, Glycine max
  Clone ID: 701100676H1
caaccttattgatcattctcttcatcctcctcttcttcttcaaaaaccaatttctttgatctcttccttatttgtatatatataaaaataaggaagacatcaaagaaaaaaatagcaaaatatttttttaaaaatatggaaggaacaagtgaaaaggggttgtgggaatgtggaaggaagtgcactccaccaccgtttttgttg

SEQ ID NO: 8041 - DNA, 278 bp, Glycine max
  Clone ID: 701100677H1
tggattcaaatgcttgtctaccacacttgctagtgttagcagtaacattggtattggttagttatgcaatgggagattcagctcaagacaaacagagatgtgcagaatccctggcaggtgcagcaacgtgtctgccatatttgggtgggacacgaaagcacccacagcagattgttgcagtcgtctcacacaagctatgaagaccaacaagaagtgtgtctgccttattctcaaagacagggatgatcctgatcttggcttaaagattaacatgacaa

SEQ ID NO: 8042 - DNA, 222 bp, Glycine max
  Clone ID: 701100679H1
gacaatagtttggttttgtagtaagtgaggtgaggtgccaaaatggtgaagataactcttggtactttcgatgactcttttggtgttgcctctcttaaggctaatttggcagagttccatgcaactctgattttcgtgttcgcgggtgtggttcagcctcgcttacaacgagtttacaaaagatgcagccttggatccaagggggctgtggaatattgtggc

SEQ ID NO: 8043 - DNA, 281 bp, Glycine max
  Clone ID: 701100680H1
gaggagggttgccacttgcatgcaccatgtacgcttcatcagagtgttactttggactcaaccttaatccgatgtgcaagccctctgaggtttcatacaccattatgccaaacatggcatatttcgaattccttccccacgatcctaagccggctccaccagttcaaaactagtggagttggcggacgttgaagtggggaaggaatacgaactggtgatcacaacctatgcgggactctatcggtaccgtgtgggcgacatcctccgagtcaccggtttcc

SEQ ID NO: 8044 - DNA, 271 bp, Glycine max
  Clone ID: 701100681H1
caagaagagcttgatattgatgttcttgttcatggagaaccagagagaaatgatatggttgagtacttcggtgaacaattgtcaggctttgccttcaccgttaatgggtgggtgcaatcctatggttcccgttgcgtgaagccacgatcatctatggtgatgtgagccgcccaaagccaatgaccgtcttctggtcatctctggctcagagctttaccaagcgcccaatgaagggaatgcttaccggtcctgttaccattctcaactggtc

SEQ ID NO: 8045 - DNA, 271 bp, Glycine max
  Clone ID: 701100682H1
ctacgattcatcgcaattcacaaaatgggcaattgcttgaggcgccaatcgcggatcggatactccaccgacgacgatgaggactgggaggattttcgggcggcggcggcggcaagcggtggtgttaagaaatcgacgagagaggtgaaaattaagataacgaagaagcagttggtggagttggttggtaaagttgaggtaaaggagttgagaatggaacaggttttggcacacttgatgaatcactctcttcaacgtccatggaggcctg

SEQ ID NO: 8046 - DNA, 272 bp, Glycine max
  Clone ID: 701100683H1
gtgagttggcggagtttctggataggaaggtccccgcgaacgcaattcctgttgaaggggtgttttcaatcgattatgttgatagaaacgcgggtttgttttaccgtgtgtacttgccagcctctggaaacgaggctcaatggggtatcaaagaccttgagaagccgttgagtactacagaaattgttcctgtgatcatattcttccacgggggaagcttttcgcattcctcggccaacagtgccatctacgacaccttctgccggcgcctt

SEQ ID NO: 8047 - DNA, 272 bp, Glycine max
  Clone ID: 701100684H1
acacggtgagggggtcgcaccggttcaagatcacggggtattcgctgtcgaaggggattgggattgggaagtacatagcgtcggatatattctcggtgggagggtacgattgggcgatctatttttaccccgatgggaagagcgtgaggacaatgcaacgtacgtttcgctcttcatcgcgctcgctagcgaagggaccgatgttagggcgctttttgagttgacgcttttggatcagagtgggaaggagaggcacaaggtgcatagccatt

SEQ ID NO: 8048 - DNA, 270 bp, Glycine max
  Clone ID: 701100685H1
agaagttctatccatctgagtttggaaatgatgtggaccggactcatgcagttgaaccagccaagtctgcatttgcaacaaaggccaaagttcgccgagctattgaggctgaaggaattcccttcacttatgtgtcaagcaacttcttgctgggtacctccctgcccaacttgtcaaagcctggagccacagctgcccccagagacagagttattatcctaggagatggaaccccaaagctgtttttaacaaggaagaggatattggaac

SEQ ID NO: 8049 - DNA, 276 bp, Glycine max
  Clone ID: 701100686H1
gacaacttcatctaattaaccatgaatcaccaacaacaatctcctgtgactgcatatccagcagtgagtcagagcaacccagcagctccaccaccacctgtgggttatcccacaaaggatgatgttccttcccaacaaaatgttccaacaaaacctctactaggggtgatggcttttggaagggatgttgtgctggattgtgctgttgctgtgccctggattgttgtctctgattgaagttatggatttgggcttatcctctctgtcctttgtcat

SEQ ID NO: 8050 - DNA, 280 bp, Glycine max
  Clone ID: 701100688H1
gaccaatctcatctcttcttctttatgttctctttccttcttttgttttctgccatggaagacgagccatttctcactaccacttcccaacccatcgccgattgccttcttccatcttccaagtccttcaacgacgtcaccaccacacgcgcgcgtgacgtcgccgccgccgccgccgaggagattcaatccgaacaacaacaacctcccaagaagaaaaaactgagccgctgcaagacggcacctgcgatggtcaccatgcgagacctcaaacctaaga

SEQ ID NO: 8051 - DNA, 252 bp, Glycine max
  Clone ID: 701100690H1
gtgtataccgttttgctgcttgagataatgatgattcttttgcttgtttattattattacatggtattgaagtaagtcactggtcattgtttgttgaagagtctttgtatgtaaaagatgtattggccctttcaacagatatatgattatagtctgcacagggttagatcctgaatttgtaacccccaattccatactttaattgccaaataagatattgaataataaaattagaacattcttttgtagcat

SEQ ID NO: 8052 - DNA, 268 bp, Glycine max
  unsure at all n locations
  Clone ID: 701100691H1
cttaaacaacacaagcttgttgaaaattttcacgttgttccagcagtgagaacaacaacctctcttcccctcacattccttgatttgcctttagcaggtcctatttatgtgagacgccaattcttctatcacttccccaattccacactccatttctgccaaancatacttccttgtctcaaaacctctctctctcaaacccttcaacacttcttccctctcgctggaaatctcatctgtccaccaacgacccacaaacccttcattc

SEQ ID NO: 8053 - DNA, 265 bp, Glycine max
  Clone ID: 701100692H1
cccataacatgatccaacaacaacaacaaagtgctccaagactcttcagaaacattggtgacttcatggtgccttctcaaggagactcatcttcagccacagaagaagcccccacctccacaactacaagtgtaaccgctgtggcacaacggttactgaaaccccacccccaccgggaggtggggaaaggaggagaaagtacaggggagtgaggcagaggccatggggaaaatgggcagcagaaattcgtgatccacacaaagca

SEQ ID NO: 8054 - DNA, 277 bp, Glycine max
  Clone ID: 701100693H1
ctcctataacaatctctaaatcaagtttgaagccgagaaaataatcatggccggtggtgcaaatttcgtgcaaagggttctctcttacgtggtgaatgaagtggttatcaatggtcttgccaacagccctgcatttcagaggtttgcagtgaggacatcaaaaagaattgaagatatttctaacaaagctgttcagaagaggcaggagctagctgagcagatcaaggacatctcgaaaaatatggagtcattcaagaacaagtaattttggtatttt

SEQ ID NO: 8055 - DNA, 277 bp, Glycine max
  Clone ID: 701100694H1
ccctcgagccgattcggctcgagcaatttctctctttctttttgtgaccaaaatggctcctagctctactcacaatactgggccctatgtgcttatgctagttgggatagtgattagcactatggttgctacctgtgctggtagcttctaccaagactttgatctaacatggggtggtgaccgtgctaagatattcaatggtggccagcttctatctctttcccttgacaaagtctctggctctggcttcaaatcaaagaaagaatacctatttggg

SEQ ID NO: 8056 - DNA, 263 bp, Glycine max
  Clone ID: 701100695H1
cgacaagctcagtagcgtcgaactcgtccgcggaatcaagaagaggatcgtcctcaagagcctagggctcagtacctcgcccttgtcctcctcgacacccttgtcaagaactgcgagaaggccttctccgaagtcgccgacgagtcgttcctcgacgagatggtcaggctcatcgatgacgctcagaccgtcgtcaacatacgcaacaaggccctcatgatgatcgaagcctggcgtgagtccaccggcgagttgcgctatct

SEQ ID NO: 8057 - DNA, 226 bp, Glycine max
  Clone ID: 701100696H1
ctcgagcagcggctgtagtactttcacaattcatagggtcgaatcagcgttatcgacggacagtgttccgcacgtaaaggggctgcagagcaccgtgccgtcgatgtcagttgaatgcgtcagcagacttccaactcgatatcggatcgccgagagtcagtagtacggcgtaatgcgaagtactcgattctgcttccatgcagatgttgcactgtgtgcggcggca

SEQ ID NO: 8058 - DNA, 288 bp, Glycine max
  Clone ID: 701100701H1
cgaatccaaaaagaaagatcaaaaggcttcttcttcttcttcttctgctgctgctgctgctgctgctgctgctgcggattctaaactcaaggcctccaattttcctggaaccattttgaaaattgggacttgggagtataagtctagatatgaaggagacttggtggcaaagtgttactttgcaaagcataagctggtgtgggaagtccttgatggttgtcttaagaataagattgaaatcccatggtctgatatcatggctatcgacgctaactaccctgaggatgg

SEQ ID NO: 8059 - DNA, 286 bp, Glycine max
  Clone ID: 701100702H1
taggagcacaggacctaagctcatttggcgaaggtgttccctgctttggaagcccttgaagatggtttgccaaatgagttgttgggacaggagggacccacaggacctaagctcaaaagaaattggcaaggtgatgaggtttgaaatggaagagcccgagaatggtggcattattgacaccatgcaattaaaaaaggagactttaatttggttggtttgcactatctgttttgtattgttatagggttcacaacaaacatgtatttcttaataataactgacaaag

SEQ ID NO: 8060 - DNA, 286 bp, Glycine max
  Clone ID: 701100703H1
ctttcaaagagacgaagccttcgaatctctctgaaacttttctactctctttgattcttctctatcagttaaacattagaatgagccgttcacaggatccacacccttcccgatctctcttcccttttggaaatccttttcggatgatatcacctaaaggctctcgcatgtctccacaacttcttgcagtgttgcaagcttttgaggcaacattggcagagaggctgaaaaatcttatgcctaaaagcaaggatgaaatcctcaccttgtcttggatgactttagc

SEQ ID NO: 8061 - DNA, 284 bp, Glycine max
  Clone ID: 701100704H1
aggctagtacacaaaatggcaacaagaagcttgatgctgcatatcaggaggcacagcagaaacctggcggcacccctgttttgctctttgtctcagttaataccagtgggcaatttgtggggcttgctgagatgattggtcctgttgattttaacaagagtgttgattattggcatcaagacaagtggaatcggtgctttcctcgtaagtggcacattgttaaggatgttcctaacaatttgttgaggcacattaccgtggacaacgatggtgaacaaacctgt

SEQ ID NO: 8062 - DNA, 287 bp, Glycine max
  Clone ID: 701100706H1
gcttcgtggtggcatgcaaatctttgttaagactttgaccggaaaaacaataactttagaagttgaaagttctgataccatcgataacgtgaaggcaaagatacaggacaaagaggggattccaccagaccagcagaggcttatctttgctgggaagcagctggaagatggtcgtactcttgctgattataatatccagaaggagtccactctgcatttggtgttgaggcttcgtggaggtatgcagatatttgtgaagactctgacagggaagaccattaccttgg

SEQ ID NO: 8063 - DNA, 288 bp, Glycine max
  Clone ID: 701100707H1
ccgtgctgaagcagtatatgcagggtcgaaaacaactgccaaaccagaaggaacaagacctacaaacaagactggcttccttggacttgttggtaaaaaggtggataccatagaatattgcaacgagaagattaatgaacttgaggccagattggaatctgagcaagaggtcactctcagagagaagcagcaagatgctgctgtagtacttttctcaagtagggtggttgcagcatctgcatctcagagtttacatgctcaaatggttgacacttggtcagtctttga

SEQ ID NO: 8064 - DNA, 285 bp, Glycine max
  Clone ID: 701100708H1
aatcgctgcccacagtgcaagggagagaaggttgtgcaggagaagaaagtccttgaagttattgtagaaaaggggatgcagaatgggcagaagataacattccctggcgaagtgatgaagcgccggacacaattactggggatatcgtctttgtccttcagcagaaggaacatcccaaattcaaaagaaaggctgaagatctttttgtagagcacactttgtcccttaccgaggccttgtgtggcttccaatttgtgctgactcacttggatagccgtcagcttc

SEQ ID NO: 8065 - DNA, 285 bp, Glycine max
  Clone ID: 701100709H1
caaagaacttccttataaccaaaaccaacaacaactatggcaagttatcagaagcactacgatgatcagggtcgcaaggtcgacgagtatggcaatgttgagaggcaaactgacgaatatggcaacccggttcatgccactagtgtcacttatgtagccaccaaaagtgttggtggctacaatgatgacgctaataagcaacatgatattactggtgtctatcccgagaaagacaccggtagacatcattttggtcgtggttacgacggtgacactaacaagcaa

SEQ ID NO: 8066 - DNA, 283 bp, Glycine max
  Clone ID: 701100710H1
ttctaagctctactaaaaaaagatacatagaaacaaatcgaaattatttattattattaaagcaacatggctttgtcatggacaaaagggagagtgttccggcgtgccagaaagggtaaggagttgaaatattctggtggcgacatggagatagagattgcgatcccccaccacttcccggtgccggtaaccttggacatgatgaaggaccccgtgaccgttttcacgggcataactatgcacgcgacagcatcgagaagtggatcgagtcccgggaacgcac

SEQ ID NO: 8067 - DNA, 282 bp, Glycine max
  Clone ID: 701100711H1
cacaatttcaaaatggctaggggactaaagaagcatttgaaaaggctcaatgctcctaagcattggatgcttgacaaactgggtggtgcatttgcgcctaaaccctcatctggaccacacaaatcgagggagtgcctccccctcattcttattctgcgaaaccggctgaagtatgctctgacataccgtgaagtcattgctattctgatgcagcgccatgttcttgttgatggcaaagtcaggactgacaagacttaccctgctggtttcatggatgttgtt

SEQ ID NO: 8068 - DNA, 274 bp, Glycine max
  Clone ID: 701100712H1
cttaagcgctcgagctgtgcagctacagatccatctgttctaagtcaattagctgaaaaattgcaattgatgggaatagctgatcttactcaagaatcacttgctttgcatgagatggtggcatcaagtggttaggatccaggagcacgcattgagataatgtcaatgttattgaagaagataaaggatttcgtgcaaatagaaaatctagtcaaggatgataatttaggaggacaaggcattttctcaaaagtctatggacttgggacaaatg

SEQ ID NO: 8069 - DNA, 284 bp, Glycine max
  Clone ID: 701100713H1
cctcgagccgaatcggctcgagattcaccttcttctccttctataccaacctgtttctccgacaatcacattcaacgcttactgtcatggaagaagttaatgtcgtggaaactaaggatggaactgtctcagtagctgctgcgtttgctggtcaccaggaagccgtgcaggatagagaccacaaatttttaagcaaagctgttgaagaagcatataaaggggtagattgtaaagatggaggcccttttggtgccgttatagttcataatgatgaaatagttgct

SEQ ID NO: 8070 - DNA, 282 bp, Glycine max
  Clone ID: 701100715H1
caaacaaataaagcaaaaggcctttttattccaaagcaaggaaggaagaaataaaccgaatgagagcattaacctcttcttcttccactttcattccaaagcgttattccttcttcttcttcctctccattctcttcgctcttcgatcctcgtccgggggctgctccgaataccaccaccaccacgcgccgatggccacgataggaggcttacgcgactcccaaggctctcagaacagcgtccaaaccgaggccctcgctcggttcgccgtcgatgaacaca

SEQ ID NO: 8071 - DNA, 276 bp, Glycine max
  Clone ID: 701100716H1
gatggcaaacgacaatgaaattctgaagtccagggaaatcattgatgacctcaacaagaagcttacaaactgtatgagcacaatagatgctaagaatactgaacttgtaaatctacagacagctcttggacaatattatgctgaaattgaagctaaggaacatttagaaggagatttggctcgtgcaaaggaagaaacatctaagctttctcaactgttgaaagatgcagactgcagagcaaatgtattgatcagtgaaaaagaagacattttagc

SEQ ID NO: 8072 - DNA, 287 bp, Glycine max
  Clone ID: 701100717H1
aaaaaagtcgtttttttattttttttattttcaaccatggctggtgtgaaccccgaggcaggagggtggcaggcttatccttctgttatggagactgctcttgatagtggtgatggaaggagtcatcataacatgagtgatgatgggtcagtggcagtgccatcatctggacagaataaagtgattcctagtccaactcagtttagcatcctctataaggggaaaatgtgtatctatgaaggaattcctgcagaaaaggtgcgtgaaataatgttgattgcttctgt

SEQ ID NO: 8073 - DNA, 286 bp, Glycine max
  Clone ID: 701100718H1
aattgctaacggttttttctcgtttttcatggccgtgggcaacgtgctaggttacgcagcagggtcctacaaaggtctccacaagatgtttcccttcacggagaccaaggcctgcgacgtgttctgcgcaaatctcaagagctgcttctttttctcaatcctcttgctgctgtttttagcaacggttgctctgctctacgtaaaggacaagcaagtggaagcacgggccttggatgacgccacgcaaccctcgtgcttctttcagcttttcggtgctctgaaagag

SEQ ID NO: 8074 - DNA, 286 bp, Glycine max
  Clone ID: 701100720H1
cttagaagttgaaggagtagtctaagtcatcaaaatggggagagctccatgctgcgagaaaatggggttgaagagagggccatggactccagaagaagatcaaattctcatcaattatatcaacacttatgaccatgctaattggcgtgcattgcccaaactagctgggctgttaaggtgtggaaagagttgcagactccggtggataaattatctgagaccggacatcaaacggggcaactttaccagagaagaagaggacaccataatcagtttgcatgaaatg

SEQ ID NO: 8075 - DNA, 286 bp, Glycine max
  Clone ID: 701100721H1
caagagatagcccaaattgtagcaaagcaccccaggcttctggttctctctgatgaaaattatgaacacataatttatgcaccggcaactcatacaagctttgcatcgttaccgggaatgtgggacagaactctaattgtgaatggactttccaagacatttgcaatgactggttggcggcttgggtatattgctggtccaaaacattttgttgctgcatgtgaaaagattcaaagccagtttacttcaggggcaagtagtatatctcagaaagctggggttgctg

SEQ ID NO: 8076 - DNA, 288 bp, Glycine max
  Clone ID: 701100722H1
ggcggattgcctgtacttcgaggcttccgactcggtgccccggctgcacacgacggactcgagctgctccgagcaggcggtgtcggcggagtttgcgagcgaggtgcagagcgagccgaagaggggcagcaacaacaacaacgagtttgcatataattacgtggatgccactctcgggaataatcagatgtcgccgctgcaggatattttcatgtacctctccaagtccttctgcaattaacacgcaccaccaccacgacgagacgacgtcgttctgtgttgtgtgta

SEQ ID NO: 8077 - DNA, 283 bp, Glycine max
  Clone ID: 701100723H1
ctcagaacctgattaaggagagtatggcacagtttagtggcaaaactttggtgcagtggttggtagcaacactgctgattgccttgttgggtggtgcacaagctgttgtgttatgtaacatcgactcaagtcaactaaacttgtgtcgtgctgcagttactggtcaaaaccctccaccaccagatgagaaatgttgtgcagttattcgccaagccaatttaccttgcctctgcagatacaagtctattcttcctttaattggaataaaacccgaaaaggcttt

SEQ ID NO: 8078 - DNA, 288 bp, Glycine max
  Clone ID: 701100724H1
gtttctgcaatggaaatgcaagccatcttaacagcattggttatggaagcaactgtggaagtagcagcaatgttgatcaagttaacactgtctgggcagcttcagagggcaagcataaagacctcacaagcaatgcaaactctcatcgatctatccaaagagaagcagctctaaacaaattccgcttgaaaaggaaagagagatgctatgagaagaaggttcgatatgagagcagaaagaaactagcagagcagcgtcccagagtgaaaggacaatttgtgcgtcaag

SEQ ID NO: 8079 - DNA, 283 bp, Glycine max
  Clone ID: 701100725H1
gccgagtgcagcctcctcgccggcgacgacgacaccgagtatctgatggagtcggagagcaaccggcgcattctagcacaaaggagctacataagctacggtgcgctgagaaggaacactgtcccttgctcccgacgtggcgcctcctactacaattgccgccctggcgctcaggccaacccctacagccgtggatgcagtgctatcacccgatgcaggcgttgaaaaagttattcttctcttttaatttcatttttttttatatatatatatctttgcaatt

SEQ ID NO: 8080 - DNA, 104 bp, Glycine max
  Clone ID: 701100726H1
aaaattctcttccgtttcaggattagggtttcaccgttacagtgactaatggcaaaaccacagcgaatctctctgcgtatctttgcgctgctcctcttgatttc

SEQ ID NO: 8081 - DNA, 280 bp, Glycine max
  Clone ID: 701100727H1
cgcggccggttcgtgccgcgcgcggttctcatggacctcgaaccgggcaccatggacagcgtccggtccgggccgtacgggcagatcttcaggcccgacaactttgtgttcgggcagtccggggcaggaaacaactgggccaaggggcactacactgagggtgctgaactcattgattctgttctcgatgtggtgcgcaaggaggctgagaactgcgattgcttgcaaggttttcaagtgtgccattctctgggaggaggaactggatcaggaatgggta

SEQ ID NO: 8082 - DNA, 280 bp, Glycine max
  Clone ID: 701100729H1
cggctcgagtgaatgaaacggccgtggaatattatgcagccaaaattgttgagtactattacattgctgaaagccccaacacaatttattgatttgtgcacccctgtgattactaaagctttatattgagaaatgacaactatatgtgccacataacatgatccggtaactatatataccaaatttggtctctgttgcaagaagtcaagaactagagaaagcaacattgatatctatctgcttgggaccatattatgcaaaattttcgaacttgctcaaa

SEQ ID NO: 8083 - DNA, 244 bp, Glycine max
  Clone ID: 701100730H1
tgtccttggccgtgggctgcgaactgttggtcttcggtcgttaattgatggagtttgccatttggaagtatagcatgatttgtcgtggttgggtgaagtgccaggagatgaaccaaccccgttgtttgtctggatctagtagtcttggttcgattgctattgttgctgggggaagtgataagtatggacatgttctaaaatcagctgagttgtatgactcttcaacaggtatgtgggaacttta

SEQ ID NO: 8084 - DNA, 285 bp, Glycine max
  Clone ID: 701100731H1
tcaagactttgacatcgcgtctttgtcttctcatcttgaacatgaacattctctgtgaatcaagagtcacgatttgtcctatatgctccgttaaagttgcacgggacatgttaaatcacataacgctgcaacatgggcatttatttaagttacagagaaggcgcaggttaagaagagtcgctattccaaacagtcagacattgtcacttttgggtcgagatcttcgtgaggctcatctacaggtgcttcttggtggtggtggtggatatcggtcaaacagtgcag

SEQ ID NO: 8085 - DNA, 266 bp, Glycine max
  Clone ID: 701100732H1
caagaagaaaaaaccgacacaaagatctagtcctagctagaatcaaacaggggcgatctcaccttcaagaacacatcgccatgggaaggtaattgcatcgtgtgctttttgcagtagccaccctcctccatggctcagcaggccaaagcagacacatggtcggtgatgccacgggctggatcatccctgctggcggagctggggcctacaccgcctgggcttccatcaaagccttcatcgttgacgtcactctcgtgttcaacttc

SEQ ID NO: 8086 - DNA, 284 bp, Glycine max
  Clone ID: 701100733H1
cacccaccgtagtcaccaaccatggatgtcaatttggcccacatcaatagttattttctccgtaatgtggctcatgagggtgaatgccattgacccttgtgcctctcaaccggataattcggacctcaacgtgattcccatctacagcaaatgctcaccgttcaaaccacccaaggcagacacatgggacaacagaattataaacatggcctcaaaagacccagtccgagtgaaatacttgtccaccttagtgagtcaaaagacagtctccacggccccaatcg

SEQ ID NO: 8087 - DNA, 284 bp, Glycine max
  Clone ID: 701100734H1
cttgatcttgatgagatgaaaagagattgtgttcctgtgctgtcgatgattggttaattacatcatgggttttttattttgatttgaatatggtttatggtttcctctatcaacaaggtacaaaagctttcgtctaattgtaaaagtggctttcttaccatgaaatggctactcttttctttattctcctgctttgttttcccacctcaaaatattggtatcttttcttgttttccctttccataaatgaaaaaaaaagtttctttgtccaatgattttttttc

SEQ ID NO: 8088 - DNA, 285 bp, Glycine max
  Clone ID: 701100735H1
cagaatcactccaacatttcaaccgaaagaaacctctctctctctctctcccatgcgtttctcaaataaccaaagctattagtttagttgcttccttattttcttcgccagagatcgcaggatgtcgtcgccgaggttcccaggtggtggagcctccgatttctacggcggagaggaggatttcccagtcagttcacggcggttcaacccaccatgaacaaccactccgccaccacaccccgccctctctaccgatcccaaccttcaattctgcttaacccctcg

SEQ ID NO: 8089 - DNA, 284 bp, Glycine max
  Clone ID: 701100736H1
ataggcatgaacaggatttaaagactacagaagcaagtgattgtagtcagcagtcgatgcttgtgacaactccagtagatgctgaagcccgggaaggctttcctgtgcagtctctagatggggttgaaaccaaaacagctgaaaagcgtaagcgcaaaagccgatgggatcaaccagccgaaacaaactcgcattctgatgtcgttatgagctctattggtgaaagccagaacattcatgaggatgttccaccagggttttcgtgtccagtaggttcattaaat

SEQ ID NO: 8090 - DNA, 287 bp, Glycine max
  Clone ID: 701100737H1
ctacgactcgccagcctaatcaatacgccaatacagagagggtgcggtaatgggttgacgtgcgcaactctcttcttcactgttgaatggcgtcaccacccccactctgcttcagaccagagtgcttctctacgacgccgtttctcacctctgccaccgaggagtaatattggtaatcagagcagacaaggacagaaagatcaaattttgttgcgttcagtctgatactgctgagctctatctgagagcttgtagtcttgaacgtgaggatgtcttgcaccgcattc

SEQ ID NO: 8091 - DNA, 285 bp, Glycine max
  Clone ID: 701100738H1
caatatcaccttgggtgctgagaatgaattaaaacatgcagttgcatttgttcggccggttagtgtggcctttcaggtggtgaatgggttccatttctacgagaatggagtttacactagtgacatttgcggtagcacttcccaggatgtgaaccatgccgtccttgctgtggggtatggagttgaaaatggcgtcccatattggctcataaaaaattcatggggagaaagttggggtgagaatggctacttcaaaatggaattggggaagaacatgtgtggtgt

SEQ ID NO: 8092 - DNA, 285 bp, Glycine max
  Clone ID: 701100739H1
gcaatctgccatatctaaggagacccgcatgggtgcttctctccttcgcttgttcttccacgattgctttgtcaatggatgtgatggttcaattctattggatgacacatcaagcttcaccggagagaagaacgcaaaccccaacaggaactctgctcgtggattcgaggttattgacaacattaaatcagccgtggagaaagtgtgtccaggagttgtttcctgcgcagatatccttgccatcgctgccagagactctgttcagattcttggaggccctacatg

SEQ ID NO: 8093 - DNA, 285 bp, Glycine max
  Clone ID: 701100740H1
ggcgatgcaacccacatccggcggcggcgggctggcaaggttccgttcagctccggcgagctggttagaatcagttctgttgaaggaagaggaagaagaagaagaccccttaagcttcactcaactgctttccactatcgatgatgctccctctcattctcaacaccaactctatggtgccgctctctcaaacaaggataaaacacctgaaatcttcatgttagaagattccgttccttgcagagtgagggctaagcgtggctgtgctactcatcccaggagtat

SEQ ID NO: 8094 - DNA, 283 bp, Glycine max
  Clone ID: 701100741H1
cttttcctttctttttctctcattccattcacattctcaacccaccacacaacttccaaccatattctctcgccacttcctcacatggacgcaaacagaaccctagagctcacggttttatcgttggaggagctccacgtggactggaagcacgccgcggagagcctctacgtggtggtacgggcagagtccatcaccagctactccacgggcacggccaccgaaagcggtggcaacccgtcgtggaacgagaagctggtagttgacgtgcccgtgcatgcga

SEQ ID NO: 8095 - DNA, 280 bp, Glycine max
  Clone ID: 701100743H1
gagggagtagcggcattaaaaatgcagatcttcgtgaaaactctgacagggaagactataaccctcgaggtcgagagcagcgacaccatcgacaatgtcaaggccaagattcaagacaaggaaggcattcctccggatcagcagcgtttgattttcgccggaaagcagcttgaagatggaaggaccctggccgattacaacatccagaaggaatcaacccttcatctcgtcctcaggcttcgtggtggcatcattgagccttccctcatggctttggctc

SEQ ID NO: 8096 - DNA, 279 bp, Glycine max
  Clone ID: 701100744H1
caaccccaatttcccaaccactactataaacaccacaaactcctctcctctcttttcttgtatccacatctccaacggaatcaagaacagccaagaaatcagagaaaaaaaaaatgccaccttttgccggatccgaaccagttggattccctaagccagattccttcatagtttccattgacgttggtgggtaactgttccaaaccacgaaacagacactaacctcggcgggtccgaaaaccttcttctccagaattgcggcggaatcttctggactcc

SEQ ID NO: 8097 - DNA, 269 bp, Glycine max
  Clone ID: 701100745H1
ggcttacctaggctccacagttcagaatgcctgtgtcaccgtccctgcttacttcaatgattctcagcgtcaagataccacagacgtcggtgtcattgccggtctaaatgtgatgcgaattatcaatgatcctactgcagctgccattgcatatggtcttgataagaaggccacgagtgttggtgagaagaatgtggtgatctttgaccttggtggtgggacagttgatgtgtcgttactcaccattgaggacggtatctttgaggtga

SEQ ID NO: 8098 - DNA, 280 bp, Glycine max
  Clone ID: 701100747H1
ataattttctattccccaaatctcctccttagactgccaacccaatatagccattggatcgaattcagtttggattcggtctgatggtttgggagttctaataagtctaaggaacagaaattctgtacatatatatttagaagatcacaggtgcttgatcagtggtgtatcaatatggacaaggtgatgaggctggcctctgaaaagggtgtggtgattttcacaaagagttcttgttgcctctgctatgcagttaacattctgtttcaagaacttgggg

SEQ ID NO: 8099 - DNA, 278 bp, Glycine max
  unsure at all n locations
  Clone ID: 701100748H1
ctcctctcacattctccttcttcttcatccttatctcttacatttcttcatcatcaggtaaaaacatctcccacttctcttctttgagtttgtatttgaatttcgtcttaccaacatgaactctagttgtaattagaaaataacacttatgaaactgcatgtanattttgttgcttcatctcattatgcatttgaaagttgtcaactttctgacgggctttgcagaagcgggatcaatcggaataaactatggaagaattgcgaacgacctacctaca

SEQ ID NO: 8100 - DNA, 282 bp, Glycine max
  Clone ID: 701100749H1
tgagattttgcattatcttttatcatgttcaattaattgtatgtactttccactttattattcatcacaatgttaacacttttttatcgttcaaccaggtgaccttgaaagtgatttcattggaagcaattgataccagttgacatttgaagcagcttgtacttcattcagttatgacttgttttcctttattattcagtaagtcgtcgtcttcttctgcgagacacgaaccagaaattgatgaaggcattcataatgttaaactctactcctacaaagagc

SEQ ID NO: 8101 - DNA, 282 bp, Glycine max
  Clone ID: 701100750H1
tccattttcaagctctcaacgccatctccagctgcttccttatcataagcgcttcgccccagagattctcgcttcctctccttcaatccttcttccaacgctattaattacacaattaacctctccgcttccctccgatccattcactccctccctcttaaaacctccttgcggatcaaatgctcccaaacagatgggaatggaagtcctgcaaagaggacagtgcttcatgatctttatgagaaagaagggcagagtccatggtatgataatctctgcaga

SEQ ID NO: 8102 - DNA, 281 bp, Glycine max
  Clone ID: 701100751H1
gttttgcaaaattatgctggaattttgatgcccaatactgagcaaccattccgtctgaactgggcaacatttagcacaggagacaagggttcagataatgttcctgacctttctatttttgtaggagatttagctgcagatgttacagatagtttgttgcatgaaacttttgctagtgtatatccttctgttaaagctgcaaaagttgtttttgatgccaatactggccgttcaaagggctatggtttcgtcaggtttggagatgacaatcagagaaccca

SEQ ID NO: 8103 - DNA, 281 bp, Glycine max
  Clone ID: 701100752H1
gtgaacgtcaagaatttgaagcaggatgttcactccattcccgattcgcccattctcgacacgacgtcgtcgtttgggtccacctcttcgtcgccttcgcttgcgaacttgccgccgattagggttcatgttgtggaggatcagaaggtgttggggattgaggagcagttcgcgcagatgggggttggtgtggggcagaaggctcagcagcaggatgagggttttgttttgctatcttcgccgcctcccccgccggttcccgcgaccctcgccgccgtggg

SEQ ID NO: 8104 - DNA, 91 bp, Glycine max
  Clone ID: 701100753H1
agaacttaagaaacgcatgaatagaggtgttttgcaaagctcaccggtgaaacaaatgatggccgtgaaccctaacaattggtggaacatc

SEQ ID NO: 8105 - DNA, 286 bp, Glycine max
  Clone ID: 701100754H1
atgatattaatcttggtgactacaaaggaaaggtccttatcattgtcaatgttgcctcacaatgtggcttgactaattcaaattacactgagctcagtcagttgtatgagaaatacaaacagaaaggtctggaaattctggcatttccatgcaatcagtttggggcacaggagcctggatctaatgaacagatacaagagtttgtttgtactcgcttcaaggctgagtttcccgtttttgacaaggttgatgtgaatggtgacaaagctgctccactgtacaagta

SEQ ID NO: 8106 - DNA, 283 bp, Glycine max
  Clone ID: 701100755H1
ttcgctacgaatttattttcaaaaaccttctcttttctcaattgggtttccatctttgatttgatttcattgccatggctccaaaggatcccaagcaagttgctgatgctgcttcttctggtggtggtggtggcttttttgcttctattgcttccagcttgtccaatttcggtagtgccatgtccaaatccgttaatggtttggtgggctacgaggggctggaggttgttaatccagatggaggaactgaagatgctgaagaggaagcaagaaagggacgatg

SEQ ID NO: 8107 - DNA, 274 bp, Glycine max
  Clone ID: 701100761H1
tgataaggcactacggatcttcagaaggtgtggctgttaatgatggtgcattgttttttgaccctattactgagatgcctgatcatgtaaagaatcggaagacatctaaagtgccctttcatgtcgcgttaacggcgacggatgctccatataacaaatggcagtgccgcgtcatgtattactggtataaacaacaaaagaagttacctgggtctgagatgggaggattcacgaggattctacattctggaaatcctgacaacttgatggatga

SEQ ID NO: 8108 - DNA, 235 bp, Glycine max
  unsure at all n locations
  Clone ID: 701100762H1
aaatggaagacgtgataacagaagcagcacccccatcaaggttcctggaagaagacctaaacatcttcacacccccatccccagctctccccaaacctttcctcatcttcccacacaacatacgagggggcnngnncngtcnnctcatcancgnccnggccccctcctccctcgctcgctgcaacgagaccctaaccgctaacgctgaggccactcgcctccggatgtctcccgg

SEQ ID NO: 8109 - DNA, 280 bp, Glycine max
  unsure at all n locations
  Clone ID: 701100763H1
cttttctcttctctgtttttccactccttctccacaatacncnatnttttgnccaatatnannctgcctaagcagnnncnttcaaatnnccttttacattttccaatttctttattctatcaaaagggttaatttgaattttgaaggaaaggacgatagatatgctgacgaaccaaaatgtggtgactcatgaggttattaacacgctgattgccatggcagcttccatttcaaactcaaccgtgttgccaagtgcaacagtaccagaatccatggctgt

SEQ ID NO: 8110 - DNA, 272 bp, Glycine max
  Clone ID: 701100764H1
ggcgttccaatccgcgtcctgacagacgtaacgtcacggagcctcatcggcgacaagtacgtgataggccgggagctaggtcgcggtgagttcgggataacgtacctctgcacggaccgcgagatcaagcaggaactcgcgtgcaagtcgatctcgaagcggaagctgaggaccgcgatcgacgtggaggacgtgcggcgcgaggtggcgatcatgtccaccttaccggagcacgctaacgtggtgaagctgaaggcgacttacgaggacga

SEQ ID NO: 8111 - DNA, 278 bp, Glycine max
  Clone ID: 701100765H1
atcgagccgcgcgagtacaccagtgatatcattaagactttgaacgacaacgggtatgaatatacatggggtactgtcacagtgaagcttgctgaagcctatggattctgttggggagtcgagagggctgttcaaattgcttatgaggcgagaaaacagtttcctactgagacaatttggattaccaatgaaatcatccacaaccccactgttaataagcggctagaggagatgaatgttcaaaatattcctctggaagaaagtggaaaacaatttga

SEQ ID NO: 8112 - DNA, 290 bp, Glycine max
  unsure at all n locations
  Clone ID: 701100768H1
gcaaacatggcatcttcaccaaccttacatacccttgtctctctcatctctcttcctcttgccactctccacttatcacctcttnattctnnctccnnctctccgtggagaaccccgaagatgacgtcatagtctcgtcgccgaagggaaccttcaccgcagggttcagccccgtgggggagaacgcgtactgcttcgcgatatcgttctccacgcaagcgacgacatagaccgttgtgtggattgcgaaccgcgatcaaccggttaacgggaaactgtccacgctttcg

SEQ ID NO: 8113 - DNA, 283 bp, Glycine max
  Clone ID: 701100769H1
atctccatcatcatatcatagccttttctttcatagctactacactactttatcactttcattctttaattgggttcaaagaagcttaattaattggttgcagagattgaaaattaggaaaatggtgagtgttgaagagattcgtaaggcacaacgtgcggaaggccctgccaccgtgatggctattggcacggccactcctcccaactgcgtagaccagagtacctatcctgactattatttcagaatcaccaacagtgatcacatgaccgagctcaaagaa

SEQ ID NO: 8114 - DNA, 279 bp, Glycine max
  Clone ID: 701100770H1
gtaccctacacttagttgttgtgttgctgtgcacccggtgagcggtgacctcttccgctttgatcttcttctgtccagggtaaccaatctggttacttgggtcaaagatttctggcatctctgtcatggcaactagacttcagtttgagaataattgtgaagttggagtcttctcaaaacttaccaatgcctattgtttggttgctattggaggttccgaaaacttctacagtgcatttgaggctgagttagcagatgttatccctgtggtcaagacct

SEQ ID NO: 8115 - DNA, 279 bp, Glycine max
  unsure at all n locations
  Clone ID: 701100771H1
aactgaaccagatcatcacacacacatactactctccaanaattcttctanaatggatctcctccttctggaaaagaccctcataggtctcttcctcgctgcggtggtcgccatcgccgtctccaccctccgcggccggttattcaagctcccaccgggcccactccccgtcccaatcttcggcaactggctccaagtcggcgacgacctcaaccgccgctacctcaccgatttggacgaataattcggcgacatcttcctcctccgcatggggcagcg

SEQ ID NO: 8116 - DNA, 280 bp, Glycine max
  Clone ID: 701100772H1
aatgcctgccttgcctcatagtggtagttcttcgaagcctttaatgatgtttagcacagatggcactggaacccttacgtcaccatctaaccagttggctgatgtggatcgctttgtggaggatggatctctagatgaaaatgttgagtcttttttgtcccatgatgacacggaccctagagatactgttggccgttgtatggatgtaagcaaaggcttcacattttctgatgtaaattctgtacgggcaagcacaagcaaagtttcctgttgccatttc

SEQ ID NO: 8117 - DNA, 277 bp, Glycine max
  Clone ID: 701100774H1
ctgagctgagaaaacccccaaccccaacctcaaccttaacctctactcactttcttttcaaccagaactatgattaagctttttaaagtaaaggaaaaacagagagaactggcacatcatgcgagtggcggaccacccgttaagaagcaaagtaccggcgagttgcgtcttcacaaagatataagcgagctgaatctaccaaaatcatgtaccatgcaattccccaatggcaaagatgacctgatgaactttgaagtttcaattcgacctgatgatg

SEQ ID NO: 8118 - DNA, 277 bp, Glycine max
  Clone ID: 701100775H1
ctcgagccgtcacaaccgaaacagtttccatctctctcacaaaatcacaacaatatcaaatcgctcccttctcttcctcttcctcttcctctccaccctccacatagcttccaccctctcaacccccaccaacttcatcaagtcctcctgcagcaccacccagtacccagccctctgcatccagtccctctccgtctacgcctccaccatccagcaagacccccacgagctcgtccagacagccctctccctctccctcaaccacaccgaggccacc

SEQ ID NO: 8119 - DNA, 279 bp, Glycine max
  Clone ID: 701100777H1
aaaaaaaacaaaaacagaaacaaaagatggatcatcagaggcaaaacaacatccatgttcttgctcttccatactctgcccaagctaccctcaacccccttgtccaattcgcaaaaagattagcttcaaagggtgtcaaagccacagttgccaccacccactacactgccaactccatcaatgcacccaacatcacggtcgaagccatctccgatggtttcgaccaagccggcttcgcccagaccaacaacaacgtgcaactcttccttgcctccttca

SEQ ID NO: 8120 - DNA, 79 bp, Glycine max
  Clone ID: 701100779H1
accggaccagcaacgtctcatcttcgccggaaagcagctcgaggacggccggaacctcgccgactacaacatccaagag

SEQ ID NO: 8121 - DNA, 272 bp, Glycine max
  Clone ID: 701100780H1
ctctctcaccaaagccttcctagaacgaaaataaaaagaagagcaattttccctcaccaaagaagaagaagcaaacaatggccgatcaacttaccgatgaacagatctccgagttcaaggaagccttcagcttgttcgacaaggacggcgatggttgcatcacaaccaaggagcttggaactgttatgcgttcattggggcaaaacccaactgaggcagagctccaggacatgatcaatgaagtggatgctgatgggaatggtaccattgac

SEQ ID NO: 8122 - DNA, 278 bp, Glycine max
  Clone ID: 701100781H1
cttctctctctgcgtcaaacacacctaccttccagtttgagctacggccatggcgtctttaccttcgggtcgcagcaacggtggttccaacggctttgatttgggttccggtgacatcctttattcgtacgacgaggaggactataccaaccacgattcttctaacggcactcacatcgatcccaccaaggattctcatgcatcaaggatgggaagaacatcaatagttcctgctactgcctatagtccgtctgaagattctttgagccaggatgtga

SEQ ID NO: 8123 - DNA, 280 bp, Glycine max
  Clone ID: 701100782H1
ggaaaggatcacgccttggacatgattcacttgttgatgggatgttgaaagatggtttgtgggatgtctataaggatgttggcatgggagtgtgtgctgagctatgtgcagataaccatgcattaacaagagacgaccaggataactatgcaattcagagttttgaacgtggaattgctgcccaagaaagtggtgccttttcatgggaaattgctccagttgaagtctctggtggaagaggaagaccatcaacagttgttgataaggatgaaggcctagg

SEQ ID NO: 8124 - DNA, 284 bp, Glycine max
  Clone ID: 701100783H1
ctctttcaccaatcaacacaaactaagttcttccttctgttgaaagcgatagccatggccacgaatccaatcgaagcggggaacggcgacgctgctcccaaccctaacgcgactaccaaatcctccgtgtacctgcaagactcggaggagctgaagcgagtcttcagccgcttcgacgccaacggcgacggcaagatctccgtctcggagttggacaacgtcctccgctccctcggatccggcgtcccgccggaggagctccagcgtgtcatggaagaccttga

SEQ ID NO: 8125 - DNA, 285 bp, Glycine max
  Clone ID: 701100784H1
aaaaaaaacaaaaacagaaacaaaagatggttcatcagaggcaaaacaacatccatgttcttgttcttccataccctgcccaaggacacatcaacccccttgtccaattcgcaaaaagattagcttcaaagggtgtcaaagccacagttgccaccacccactacactgccaactccatcaatgcacccaacatcacggtcgaagccatctccgatggtttcgaccaagccggcttcgcccagaccaacaacaacgtgcaactcttccttgcctccttcagaacaa

SEQ ID NO: 8126 - DNA, 266 bp, Glycine max
  Clone ID: 701100785H1
cgatttcatcacctccctttcctcttctccaaaatccacagcccaaccatccgtcgccacgtggtggaaaggcactgaaaaatactaccaactcatcaagtcggcaccaaaacccagcctcaccctcgctctcggtgcccaaatcctcgacgagaactactcccttggaaaatcactcaccaccgacaacatcgttagtttagcatccaagggtgctcccaatgacgccatcaacgttgttctaacattctcggacgtaaccgttg

SEQ ID NO: 8127 - DNA, 284 bp, Glycine max
  Clone ID: 701100786H1
tctgcagattgaagccacaggtctgctccttttctttggcttcaatttgtaaaggtttgattttgaagaggaagcatacagtggtattatagtggagatctgggacttgttttgcctcttatgccctatgaggactttcttcaccgcagaatcgtgtaaagaagcacaccatagtgctttgaatccacagtcctggctccaagttgaaagagggaagcttcccagattgtcatcacagtcctcttctgcatcaatagaatccctaatcaaggtcccacagtcat

SEQ ID NO: 8128 - DNA, 284 bp, Glycine max
  Clone ID: 701100787H1
ctttcccgttgaacacacacaggcacaagaaaacccaccaaattatctcgttccgaataatcaagaaaattttgaaaaaaaaaaagagaaaactttattcacacacattcattcatttatcataatggggaagcttctctgtgactcaacctccgtcgccgaaccattccaaggttcgccgccggccgcgcttccgtggcgggaacccaaaccagaacctataggaaccgtagatctcgtcgttccggccaacgtcggtggcgcgccgttcgccggcggtgggt

SEQ ID NO: 8129 - DNA, 272 bp, Glycine max
  Clone ID: 701100789H1
aataataaccccctttttccctctccatacccttttgctttctttatccaataataagaacttcccacgagtggctttaactggtctggtctgctctggtcggacacacaaaaatattagtatggagaaggtgagttttgtgaagaatggagagcttagattgcctccggggtttcgtttcgacccgactgatgaggagctggttttgcagtacctgaagcgcaaggtcttctcctgccctctgccagcctctatcattcctgagggtgatg

SEQ ID NO: 8130 - DNA, 277 bp, Glycine max
  Clone ID: 701100790H1
atttttggctcaatggtgatccaaaagcgaaagatggtggttaaactaatttttggaggtattgatcctaaacacttcaaaggagatcacatttatgtcccagttactaaaaagaagtactggcagattgaaatgggagatttttttattggaggtctctcaacaggtgtttgtgagggtggctgtgctgctattgtggattcaggaacatctttgcttgctggtccaactactgttgtaactgaaatcaatcatgctattggagctgaaggagttc

SEQ ID NO: 8131 - DNA, 276 bp, Glycine max
  Clone ID: 701100791H1
caagtgttggatgcatttctatttctaactaattattgtgcttattattattgttgagaaagaaaagaatggcaaagttactaaaattctttgagttgaacacaggggccaagattccttctgttgggttaggcacttggcaagctgagcctggtgttgtagccaaagctgtcaccacagccattctggtttgatacaggcatattgattgtgctcaagcgtataacaatcaagcagagattggttctgctcttaagaagctttttgatgatggtg

SEQ ID NO: 8132 - DNA, 277 bp, Glycine max
  Clone ID: 701100792H1
accatttgatccaacagacacactccctctctctcttgttcattctctctcagtgctctcgatctccatctgcaacttccttgtctgacagatcctgtgttccggagaaaggaaaggaaaggaaagatgtcggggcaaacgcagcgtctgaacgtggtccccaccgtgacgatgctgggagtggtgaaggcccgattggtcggcgccacgcgcagccacgcgctcctgaagaagaagagcgacgcgctcacggtgcagttccgccagatcctgaaga

SEQ ID NO: 8133 - DNA, 278 bp, Glycine max
  Clone ID: 701100793H1
cagatcttcgtcaagaccctcaccggaaagaccatcacccttgaggtggaaagctctgacaccatcgacaacgtcaaggccaagatccaggacaaggaaggaattcccccggatcagcaacgtctcatcttcgccggaaagcagctcgaggacggccgtaccctcgccgactacaacatccagaaggagtcaacccttcaccttgtccttcgtctccgtggtggcatgcagatcttcgtcaagactctcactggcaaaaccataaccctagaggtcga

SEQ ID NO: 8134 - DNA, 280 bp, Glycine max
  Clone ID: 701100794H1
gaggctgccgccgtcgtcgaggacgtcaagaaaaaccccgacgccgccgtctccggcaccgtcatccgccgccgccttcagctcatgatgtacaacaacatgtaccgcataatgttcgaccggaggttcgagagcgaggaggatcccatcttccagaggctaagagccttgaacggagagaggagtcgcttggcgcagagctttgagtataactatggtgattttattcccatcttgagacccttcttgaagggttacttgaagatttgcaaggaggtga

SEQ ID NO: 8135 - DNA, 277 bp, Glycine max
  Clone ID: 701100795H1
aagaaagattcgaaacgaagaaagaaagcgttgtgaagaatggcggaagagggacaagtgatcggtgtccacagcgtagaggagtggaaggaacatctcaagaagggagaagagtccaagaaattgattgtggtggattttactgcttcttggtgcggtccatgccgtttcattgccccaattcttgcagagtttgctaaaaagttgccgaatgtcaccttcctcaaggtggatgtggatgaattggagactgtttccaaggagtggggaattgagg

SEQ ID NO: 8136 - DNA, 279 bp, Glycine max
  Clone ID: 701100796H1
agttcatcatcgccttcaacgccctgaccttgaagacgatgagaagcaacaagaccaagacaacaaccttaacgatcacgaagggcttgacctaattacaccaaatccaggtcctggtgatgttgttggtcgcaggccaagaggaagacccccaggttcaaagaacaagccaaaaccaccagttatcatcacaagagagagtgcaaacacccttagggctcacatccttgaagttagtactggttgtgacgtctttgaatcggtcgctacctatgcaag

SEQ ID NO: 8137 - DNA, 279 bp, Glycine max
  Clone ID: 701100801H1
ctctgaatatggtgagcaagttgttatgctaggaggaaggatacttgagatattgtccataaatcttgggcttagagaggattttctcctaaatgcatttggtggggaaaatgaccttggtgcttgcttaagggtgaatttctaccctaaatgcccacaacctgacctcactcttggcttgtcccctcactcagaccctggtggcatgaccattcttctccctgatgaaaatgtgtcaggacttcaagtacgcagaggagaagattggatcactgttaa

SEQ ID NO: 8138 - DNA, 277 bp, Glycine max
  Clone ID: 701100802H1
aaaataggtcaaggtggttttgggtcagtctattatgcagaactgaggggagagaaagccgcaatcaagaagatggatatgcaagcatcaaaagaatttcttgctgaattgaacgtcttgacacgtgttcaccatcttaatctggtgcggttgattggatatagtattgagggctctcttttccttgtctatgaatacattgagaatggaaacttaagtcaacatctgcgtggttcaggtagtagagaacctctgccatgggctactcgggtgcaga

SEQ ID NO: 8139 - DNA, 277 bp, Glycine max
  Clone ID: 701100803H1
cggtgccctagattttctctatcctttcactcgttcccgaattccctcccgctagggtttcccatggattccgaggacgatatgcacgacgccaacgatgtggagtcccttgacgacgatttctacagtggcgagaccgaggacgctcccatggattactacagtgactacgacgacgaagctgacgattacttcgacgatgctgacgattctgaccgggttgagtctcgccgccctgagcaaaactttacaatattgagggaattggatatccggc

SEQ ID NO: 8140 - DNA, 280 bp, Glycine max
  Clone ID: 701100804H1
gagattattttttcatgcagaaacgagggatcatctaattaaaccagctttcatcagggtgtgggtgatttattgtaagctttttcttattatcttcgattgtgtttacacgtgtgtgttaaaggtggcgaatcctaaagagaagggaaatgaggttgatgacaataaggaattgatattattccatgaagggataatgaacaaccctacattgtcaaggctatttccgggtttgaatagggagagggagatgtctgctatggtctcagctttgacccac

SEQ ID NO: 8141 - DNA, 277 bp, Glycine max
  Clone ID: 701100805H1
cttcactcgtgtatatatcaaataaaacggacttgcccaaggttttcttaattgatgatgttactgttccaactcaagacactaatcagtcatattgggagattacatctgatgaatacctagagtacataaagcaatatgttgtgggaattggaccttggaaggacacagtggtacctgtggtaaaaaattatatgacaaatcctactaatcttgttgccagggcacatgctcataacctgcaggtgcatccatatacttaccgaaatgagttccc

SEQ ID NO: 8142 - DNA, 278 bp, Glycine max
  Clone ID: 701100806H1
gattttaactatggcccatatatgctcagggaagaagttgaaaaatacaagaggtatgccgagaggttggagccctttattgctgatactgtgcttgtcatgaatgacgccatagaacaaaagaagaagattttggttgaaggaggacaagctaccatgttggacattgattttggaacttatccctttgttacttcttctagcccatcagctggtgggatatgcactggtcttggtattgctccaagggtacttggtgatttaataggagtggtgaa

SEQ ID NO: 8143 - DNA, 278 bp, Glycine max
  Clone ID: 701100807H1
gataggtaccagctatcacatagtttatttaatccgttatatgccacctgatatataggcatattagctagttaggtaggtatagtagtttaagttaattcaaccatggaagacagggatcactgttgttccaacaattcaacgatgatcacaacaacaaagaaaagaacgggtagaagaagtccaacatcggataagctcaagaatcaacaccgcgagaagcagtcgatgaaaccttaccgtggaataaggatgcggaagtgggggaagtgggtggc

SEQ ID NO: 8144 - DNA, 275 bp, Glycine max
  Clone ID: 701100808H1
ctcgagccggttttggatcctcctttttattccttttttctttacccttttcgtgaggtaaccaacaactcatggcttttacggttccaagaagttaatctgaatgcactcaagaaagaaatgaaggcaaaatttatatagatagcaatggcataaagtgggtggaagttgacatgaggatgggtggccatgttgtagttgacacatgaaaagaccataagaggaattaatcgaagattggtgagagggtagagaaattaaagattttagaacaa

SEQ ID NO: 8145 - DNA, 278 bp, Glycine max
  Clone ID: 701100809H1
gtttctgcgaggcttaacaaacctcgcagaacaaaaaaaaactcactctcacatactttggtttgcaaaaaccctttacttctctattttcttgctagttccttatccaatattatagtacccttttatcccaagttatttaaagttaaaacctttattactactcatatttgttttttgtttgttaaattttaagaaatggaggcacattctccagttatagccaagaagctatggaatgtgttgaggatcactttcttcatgatcaggaagggttt

SEQ ID NO: 8146 - DNA, 134 bp, Glycine max
  Clone ID: 701100810H1
aaattaatcatcttacttatttattctccgaaaatggttgatttacattggaaatcaaagatgccaagttccgacatgccttccaaaactctaaaactctctctctccgacaacaagtccttagcctctttgca

SEQ ID NO: 8147 - DNA, 276 bp, Glycine max
  Clone ID: 701100811H1
gccggcgattccacgtcactctccggctagctcccggcaataacgggcacggcggcaggagtgccttcgagctgggcgcggcggtgcgcggatctgtcctacagcgggaagcttctgatgcagagcgatttggacttgacattgggaaagttggaagctcacgtgatgaagctatctgagatattcaagaagggcgtgtcgatgcatggctactccgtagtagtttcaaggcctggttttggagcttgcaaagatgacatgaggttctacttaagg

SEQ ID NO: 8148 - DNA, 273 bp, Glycine max
  Clone ID: 701100812H1
gagaaaacatggggactattctgctggttcaaattcaactcagactaaattgaaccttggggctacaattcttgcttcgagatttgctgctaacacacgaagaggggctctgaagatgaaagatgacatgccccagttacagaagcctgaagaacctgacttttccactgaagctgacgatgattagttacacttattcagtggcatttggttttcaaattcggttgggtcctgcattctatttcagtatggataatgattctgcaggtcaca

SEQ ID NO: 8149 - DNA, 274 bp, Glycine max
  Clone ID: 701100813H1
ctcctataacaatctctaaatcaagtttgaagccgagaaaataatcatggccggtggtgcaaatttcgtgcaaagggttctctcttacgtggtgaatgaagtggttatcaatggtcttgccaacagccctgcatttcagaggtttgcagtgaggacatcaaaaagaattgaagatatttctaacaaagctgttcagaagaggcaggagctagctgcgcagatcaaggacatctcgaaaaatatggagtcattcaagaacaagtacattttggta

SEQ ID NO: 8150 - DNA, 274 bp, Glycine max
  Clone ID: 701100814H1
gcaaatccttctgttgatgccatcttgcaaacaaaagactcggtccttgacaagctatgggagataaatgtcacagccactatacttcttctgaaggacgcagtgcctcacttgcagaagggttcttctgttgttatcatttcctcaattgcaggttttaacccgccaccttctctggctatgtatggagtgaccaaaacagcccttcttggacttactaaagccctggctgctgagatggccccaaacactcgtgtaaactgtgttgctcctg

SEQ ID NO: 8151 - DNA, 275 bp, Glycine max
  Clone ID: 701100815H1
acttgatgtgtcaacatcatcaaggtctcaagaggatgcctagaagactattaggctatatctacattatgatgctgttagccactcccctgacaggtaatgtcgagcaattggcgatattgtcaaacttggggagactcccatgacttctcctggttttccttcttgcaatcctcatgctattcctccaatctttagtgcttgatggtataactgcacttctgaagatatctcagaagatgacaaaaaatgtcgccttcgtaaggcattaggtt

SEQ ID NO: 8152 - DNA, 276 bp, Glycine max
  Clone ID: 701100816H1
gtaccgtgccagtgggacgtgttgagactggtgtcgtgaagcccggtatggtggtgacttttggtcacactgggctgacaactgaggttaagtctgttgagatgcaccatgaggctctcacagaggctcttccaggtgacaatgttggctttaatgtgaagaatgttgcagtcaaggatctcaagcgtggttttgttgcatccaactccaaggatgaccctgccaaggaagctgccaacttcacatctcaagtcattatcatgaactcacctggcc

SEQ ID NO: 8153 - DNA, 275 bp, Glycine max
  Clone ID: 701100817H1
gggaaaccaggtgttggcgcactctttgtgaaggtcagcatggatggtgctccgtatcttaggaaggtagatctaagaagttatacaacttatcaggaactatcatctgcccttgagaagatgttcctaagctgttttaccctaggtcagtgtggttcccatggagctccaggaagagaaatgttgagtgagagcaagttgagggatcttctgcatggttctgagtatgttctcacttatgaagataaagatggagattggatgcttgtagggga

SEQ ID NO: 8154 - DNA, 277 bp, Glycine max
  Clone ID: 701100818H1
agaagggtaaactaggagtaggagggaagaagggttgaaggaagaaaaaaagaaaaacacagaaatggagggtgggaacaacagcagcagtaacaacaaccctgatgagttggcggtggggtgcttgctttcgatcaggacaacgttgggcgacgaattcgaaggccaggtcgtcaccttcgatcgcccctccaacattctcgtactccaggagccttccaaacctagccctcgtcgaaatcttaggttgctcaaagccaattacatcaaagacttc

SEQ ID NO: 8155 - DNA, 277 bp, Glycine max
  Clone ID: 701100820H1
ccaaaacccccagtgtacaagcccccagttgaaaaaccaccagtgtacaagcccccagttgagaagcccccagtttacaagcccccagttgagaagccaccagtttacaagcccccagttgagaagccaccagtatacaagccaccagttgagaagcctccagtgtacaagccaccagtagagaagcctccagtttacaagccaccagtagagaaacctccagtttacaagcccccagtggagaaacctcctatttacaagccacctgttgagaagc

SEQ ID NO: 8156 - DNA, 168 bp, Glycine max
  Clone ID: 701100821H1
ttttcaactggtttggtgagatgaagggtgttctttccatcagcttcttgttttgttgcttgctgctacttttggattcttcagtttcacttcctctatgcgttgattcaagggcaccctttaccttgaacaagacacttgggttttgtccttacaatggaagcacgt

SEQ ID NO: 8157 - DNA, 279 bp, Glycine max
  Clone ID: 701100822H1
tcttgattcattttgttgtctcaattaaacctttgttttggtctgaattgaaaagggttgtgaattaatagtgatgtttctctctagatcaattctctttgtgtttgtgttctcagcttgcttgcttctatttccagccaatggaattcgatcatttgccacaacaaatggttatgaaactgaggttgaagaagttgatccttttgtgcaattcagagaggccccagaatacagaaaccagcaaaagtgcactctaattgacacaaccaatgttcaatt

SEQ ID NO: 8158 - DNA, 275 bp, Glycine max
  Clone ID: 701100823H1
gtcgacatgctgcgaaagcacacgtacaatgacgagctggagcagagcaagcgcagcgcggcgtcgtccggcggcgaggctccgccgtcgccggcaccgcaaactcaatttccggcgcgtgctttactaaggcacgtgagcagctattcgagaaggctgttacgccgagcgacgttgggaaattgaaccgtttggtgataccgaagcagcacgcggagaagcactttccgttacagagctctaacggcgttacgcgacgacgatagcggcggtga

SEQ ID NO: 8159 - DNA, 276 bp, Glycine max
  Clone ID: 701100824H1
cggctcgagatccgaaggcatattttgagattccatgggcaagtttgaggggattggttgagccaacttttgctgaaaggatagtgatcaaccatagagagtacttcaaaaagggtaaccttgttgtatccagtgctgtcaacataactgaaactgcagtggtgactgaagatggccagcagattgcctatgactatcttgttattgccactggacacacagaaccaatccccaaaaccaggagtgaaagacttgaccaatacaaaggagaaaatg

SEQ ID NO: 8160 - DNA, 144 bp, Glycine max
  Clone ID: 701100827H1
tgaaacccctgagtacatgcccctcagccatgtccttgcaaccaaactcggtgctcgcctcaccgaggttaggaaaaatggtacctgtgcttggctgaggccagatggcaagacacaagtaactgttgagtactacaatgacaa

SEQ ID NO: 8161 - DNA, 276 bp, Glycine max
  Clone ID: 701100828H1
caaaaacaatcatcaatcatgggaagcgatagaaaatcgaaacgagcttcaccctcccaacgtgaagatgagaagagaagcaagaggcagagaacggtagaggatgaggaaaggaagaagcggaaaagggaaaagaaggagaaaaggaaggacaagaaatctcaccagcattccaaagaaaataattctgataaggggaagttgaaagataagcacagaagcaaacatagcaaaggtgatgaccatatggaattccaagaattgtcaaatgatgac

SEQ ID NO: 8162 - DNA, 273 bp, Glycine max
  Clone ID: 701100829H1
cggctcgaggagaatagagagggtcgtgctgcagctttcggtgatgatattgcaattgaatgccttgctacagagttcaagcgagagatatatgtggttggtgcggtgctggagctgaccactatgagcccctcattgctcatccttccgcctttgtttcccaagaaaaggttgctgtggtactgtgaggtttcgcggcctgcaattttgtggagtagagatcgagtagaattagaattttcttcaccctattttatgggccactctcaactg

SEQ ID NO: 8163 - DNA, 274 bp, Glycine max
  Clone ID: 701100831H1
caaaagggaaagatggtgtgcataaggaaggcgacggtgaaggaccttctggcgatgcaggcgtgcaacctgttctgcctccctgagaactaccagatgaagtactacctctatcacatcctctcctggccccagctcctctacgtcgccgaagactacaacggccgcatcgtcggctacgtcctcgccaagatggaggaagagaccactgactgccacggccacatcacctccctcgccgtcctccgcacccaccgcaagctaggcctcgcca

SEQ ID NO: 8164 - DNA, 277 bp, Glycine max
  Clone ID: 701100832H1
gctatttgtggcgctggcgtggtgaagggtttcgaggggaaaacaaaatacggtacgttgaatggtggtgccaactttgttgcccctggttacaccaagggtgatggtcttggtgctgagattgttggcactttcgtccttgtttacaccgttttctccgccaccgatgccaaacgtaacgccagagactctcacgtccccattttggcacctttgcctattgggttcgcggtgttcttggttcacttggcaaccatccctatcaccggcactggta

SEQ ID NO: 8165 - DNA, 277 bp, Glycine max
  Clone ID: 701100833H1
ctggtgcaactatcacatgggacattgtagtgggagggtgggacttggaatacagtgctgagtttgtgccaaatgctgaaggaagctacaccatagctgttgagaagccaaggaaaatgggggcatcagaagaagcaatccacaactcattcacatcaaaagaatctggcaaaatggtactctcggctgacaacactgcctcaaggaggaaaaaggttgctgcatatcgctacgttgtccgcaaaagcagcaccatttgagaatggctattattaaa

SEQ ID NO: 8166 - DNA, 273 bp, Glycine max
  Clone ID: 701100834H1
gctgagcttatggacattattctccccaagagatctggggggcaagtggcttcatcaccgccatttttctgtggatctccacctagcagggcttcaaaccctgtgatccaagatgagcaatttggtagtaatggtaatgagagttttggttcattttccttggcacccccttcaccatcttcctcagcaagaggctgtgttaggatgaagtttggtcacaccccagcagcagtgaggattgaaggttttgattgcctcagcagggataggcgc

SEQ ID NO: 8167 - DNA, 276 bp, Glycine max
  Clone ID: 701100835H1
ttgaaatctccctttcaaaccttacactcctcatttcgtttccgtagcagttttctcacacttcaccgctgcttccccttcacctccgatttcgtatcagtagtcagagatcaaaatgtctcgaagatatgacagccgtacaacaatcttctcccctgaaggacgtctttaccaagtggaatatgcaatggaggctattggtaacgctggtaccgcaatagggatcttatcaaaagatggggttgtgctggttggtgaaaagaaagtcacatccaa

SEQ ID NO: 8168 - DNA, 272 bp, Glycine max
  Clone ID: 701100836H1
gaaatagatggctcatcagtgagagattcttcttctcctctattcgcaaatttaatctaagctatcgaatgtggtgcaagacttagaattcattttggcacttgtaccctccgaatttcaatggccgatcactcagattcttctcctcttgttcctccccttcccctcgctgacccttccgagatcgacctcgaagccggtccctccgaacaaatccagtgcggaatttgtctcgaaactgacggtagagatttcatagcaccttgtaagtg

SEQ ID NO: 8169 - DNA, 278 bp, Glycine max
  Clone ID: 701100838H1
gcttaatcgaactattcagattctaaaaaatgagttggtggtgggctggagcaatcggtgctgccaagacgaaattcgaggaagaggaaccgccgcgaagcttccagagcgtgggcctggtgatcggcgtgacgggcatcgtgggcaacagcctcgccgagatcctccctctcgccgacacccccgccggtccatggaaggtctacggcgtcgcacgccgcccccgtccgccgtggaacgccgaccatcctgtcgagtacatccagtgcgacgtctcc

SEQ ID NO: 8170 - DNA, 279 bp, Glycine max
  Clone ID: 701100839H1
aaaaaggtcttgcaagacaggcggtacaaaaatcgtgaattgcagttaatgcgcttaatggatcacccaaatgtaatttccctgaagcactgtttcttttccacaacaagcaaagatataactttttctaaacttggtaatggaatatgtccctgagtcaatgtaccgagttataaagcattacactactatgaaccagagaatgcctctcatctacgtgaaactgtatacatatcaaatcttcaggggattagcatatatccataccgccctgcgagt

SEQ ID NO: 8171 - DNA, 276 bp, Glycine max
  Clone ID: 701100841H1
caataacatagcatagagtgagaagtgagaacagaaaaatggcaatctccatacgcagtagacaacttttcatagatggagagtggaaagtccctcttctcaacaatcggtttccgatcatcaaccccgctactgaagacatcatagggcatattccagccgctactaaggaagatgttgaccttgcggtggatgctgctaaaagagccttttcccataacaaaggcaaagattggtcttcagctcctggctctgttcgtgctcgctatcttcgag

SEQ ID NO: 8172 - DNA, 274 bp, Glycine max
  Clone ID: 701100842H1
cgacacgtttacgttcgattttaaaccagttgttctgggtcccgatgttaccatcaagtcactcgccaaggcttcttccttctgatcctcctcatcacctactctacctcaaacttaaaatcaatcttctttttaatgtgtattagttaattaataattcaataaaacaaagtaaatatatatattaaaagtaggatgtgcactggacagcacagcagtactcatgaattgccgcttgttgcattttgtgagagaggtgtgtacattatttgct

SEQ ID NO: 8173 - DNA, 270 bp, Glycine max
  Clone ID: 701100843H1
agtctttctagtacttttcttgtttcatgttggggataggcacttttatactgtcttcccgggaatattcctttttagccttgataaactgatccgaatcatacaatcaagtccaaaaacttgcatggtttcagctagaatttttccaggcagagctctggtgctaattctgcccaaagatccagggatgaaatataaccctactagtgttatatttttgaagattccaaccatatctcatcttcaatggcactctttcagtatcatatc

SEQ ID NO: 8174 - DNA, 271 bp, Glycine max
  Clone ID: 701100844H1
gataggcaaacactattatggagtgctacatggccaagggaggttgagactctggcaaggcagtttctgcgcaacccatacaatgtaattattggctcaccatacctgaaggcaaatcaatccataaatcaagttgttgaagttttaacagacatggagaaatacaatagattaatcaggctgctgaaagaagtgatggacgggagccgaattctaatatttatggagacaaaaaagggatgtgatcaagttaccagacaaatgagagtgg

SEQ ID NO: 8175 - DNA, 270 bp, Glycine max
  Clone ID: 701100845H1
gatgtttctcacaaggactgagtatgaccgaggagtcaacaccttttctcccgaagccgtttgtttcaggttgagtatgcaatcgaagccatcaagctgggatcaactgcgattgggttgaagaccaaagaaggagttgtccttgcagttgaaaagcgcatcacatcgccgctcctggagcctagtagtgttgagaaaattatggaaattgatgagcacatcggttgtgcaatgagtgggttgattgcagatgctcgaacacttgttgag

SEQ ID NO: 8176 - DNA, 273 bp, Glycine max
  Clone ID: 701100847H1
atggagaggcgacttcttagtaggaaccagggtagagaagatgacaatattgaaacaataaggaagcggtttaaggttttcttggagtctagtcttcccgtgattaattattatgatgcaaagggaaaagttcgcaagattgatgctgcaagacctatcgaagaggtatttgagacagtcaaagcaatttttggtccaaagaatgacaaggctgattgagcatgttcatcttgactccatggtggaaatttagaggtcatatcagtattggtg

SEQ ID NO: 8177 - DNA, 272 bp, Glycine max
  Clone ID: 701100848H1
tacaagttaacgagttatgggagctccccggacctcagttttaaaggggctttagggcgttaaaaagaaagcgcagagaaaggtgttgttctcagatccatccatcagtggtgggcgatgttgttgttctcagatccagactgagggggtgaaggaaaatgaagtcgtcgaggcgtctgttgaggatcgggcttgtgtcggcgtggtactcgtcgaacattggggtgctgcttctgaacaagtacctccttagcaactatggcttcaagtac

SEQ ID NO: 8178 - DNA, 274 bp, Glycine max
  Clone ID: 701100849H1
gtcgcgttgtgttgcgtcgtgtcgtgcgctgttcctctgtttctcgtttttgtgttcagaccgaaccctagctccgcatcgcaaccatgtcgaccaagcaaggtggaaaagctaagcctttgaagaaacccaagtctgataagaaggattacgacgagattgatgtggctaacattcagaagaaaaaggaagaggagaaggcgctaaaggagttgaaagccaaggcgcaacagaagggaagctttggaggttctgggctcaagaaaagtggaaa

SEQ ID NO: 8179 - DNA, 275 bp, Glycine max
  Clone ID: 701100850H1
agaagaaggacaagaagaagaaggagcatggacatgaccatcatggtcatagcagcagcagtgacagtgattagatcttatatgttaaggtgtacggtacgatggtagtgaggagccagaatccctcttcctgctttatgatataatacaaataaaatagcgattccggaaatcatgtctgtagctgctctttttatttatgtgataaatgtaaaacgctttggtttggcttggccgttgtgcattaggttgaaaaaataaatgttataattact

SEQ ID NO: 8180 - DNA, 274 bp, Glycine max
  Clone ID: 701100851H1
gagaaattaagaagctagtttgcttgtttttcggtgaactcagggagtcagatagataatactgatcccccgagatattgagattcatctaagagattaatatcatcctacccaaccacaagcttagattgaaacaagatggaagtggtggtacaaagtcctagtagtccaaccatggataatttcgattttggtggcaacatgggttcgatctatcaaagtgttccttcttcaccaaaaggttttggtaattactacctaagcgcacccgcga

SEQ ID NO: 8181 - DNA, 276 bp, Glycine max
  Clone ID: 701100852H1
cgttcatgaggtttgcttgggtggtgcgaccgcgtaacctacatcttcttgcatgccatgtcaccaatgagactatgcaactatatcaactctcaaggtggttcagagctcaaaggacccttgaacagaacaaaaaggaaacagatgcagagtgaaacgtcgatttgtttgaactttgaaattcaaagaaaaaatttgtcctatagctttagaaacaattccttgacagtaaaaaataaaataaaaaacaaaaaaaaaaacaacgcctttatgact

SEQ ID NO: 8182 - DNA, 276 bp, Glycine max
  Clone ID: 701100854H1
aacgaatgtattattagtattgagtttgttcctccatcgcgaaattagggttcgctcacttgtcttcaatttcccaaattcaccctgcaccatccttgaatcctccaattgacacgccttttggatccatttttctccgtgaggccgtgacgcatcgcgattttgttttgggaacccgcgaaactgaatcagatagtgcggcacggaaactaggaattagagcaatggcagaagatctggtgctggatactgcaatcagagactgggtgctgatcc

SEQ ID NO: 8183 - DNA, 270 bp, Glycine max
  Clone ID: 701100855H1
gtccatctgacttgcaaactatttacctagattgttgcactagtgggtgactcaaaattggcttccttcaaattctgtcatagaaaaaagtccagcattcttcaacaaaggagatatatatattttagagacaattcctggcctcccaatgcttaccaaggcaagttacatgtttgatgtttctttcacttgttctattatgtgaatatatacataggctctttttggataaattttccagtacttacagaaaaagaaaattaagaaggt

SEQ ID NO: 8184 - DNA, 278 bp, Glycine max
  Clone ID: 701100856H1
cgaagacggcagaactctcgccgattacaatatccagaaagaatcgacgctccacctcgtcctccgccttcgcggtggcatgcaaatcttcgtcaaaaccctaaccggtaaaacgattacgctagaggtcgagtcctctgacaccatcgataacgtgaaagctaagatccaggacaaggaaggcattccaccagaccagcagcgcttgatcttcgccggaaaacagctcgaagacggcagaaccctcgccgattacaatattcagaaagaatcgacgc

SEQ ID NO: 8185 - DNA, 276 bp, Glycine max
  Clone ID: 701100857H1
ctcgagccgcttcccttctcttcacatctcatctaaatctctatctctgtctctgtctctagtccgctcagctttcactccaaaccctaaccaaccgctctctttcgcctatcccggaaaccttccgaatcgtttaattgacgctacgccgtggaatcttggcggaacaaatccacgatggcggcctccaccaccagccaggtctacatccaggtaatcgacgatgtcatgaacaaggtccgcgacgagtttgtcaacaacggtggtcccggcgac

SEQ ID NO: 8186 - DNA, 273 bp, Glycine max
  Clone ID: 701100858H1
gcggtgcggcgatcctagcactctcttctgcagctttcgccgacacgttcattcaccatggctgagcaaaccgagaaggcttttttgaaacaaccaaaagtgtttctcagctcgaagaaaactgggaagggaaagagacccggaaagggtgggaaccgcttttggaaatccattgggcttggatttaagactcccagggaagccatcgaaggaacctacattgacaagaagtgccccttcactggcaatgtttccatccgtggccgtatcttg

SEQ ID NO: 8187 - DNA, 271 bp, Glycine max
  Clone ID: 701100859H1
gttgaacatgattgggataaaaaaaaactcaacaaccactgttgctgtgaacctagcaagtagataacttgtaccaatttatctgtgtgtgtgtttaggtgggcaattttgaaatccaggcgatagagaaagtcccgtagttcttaatttgtgtagtattttatgttccagtttagggtaacagtattttgtgcgtgttgctcattggttgtctaaagtagtagaataaggatttattgtttcttgtcatgagttggggaatatacctatg

SEQ ID NO: 8188 - DNA, 268 bp, Glycine max
  Clone ID: 701100860H1
tgagagtttccgtagtctgtttcgatccatcattcaaaaattcatggaggtttatcaacctgaggcagttgttctacaatgtggagctgattcattgtctggtgacagattgggttgcttcaacttgtctgtgagaggtcatgcagattgccttcgttttcttagatcgttcaatgttcctttaatggtcttgggtgggggtggatatacatctcggaatgttgcccgttgttggtgttatgagacagcagtggcagtaggagtggag

SEQ ID NO: 8189 - DNA, 271 bp, Glycine max
  Clone ID: 701100861H1
ctttatttcagggtgttgatttttgctcctcaatcactcgtgcaaagtttgaggaaatcaatatggagctctttgaagagtgtatggaaacagttgataggtgtctttctgatgctaacatggacaagagcagtgtacatgatgttgtccttgttggtggttcttctaggattcccaaagtgcaggagctattgcagggcttcttcgatgggaaggttctgtgcaagagcatcaaccctgacgaggctgttgcttatggtgcagctgtgca

SEQ ID NO: 8190 - DNA, 273 bp, Glycine max
  Clone ID: 701100862H1
ctttgttggttgtgaagtgtgtgtgtgattctgggttgtctgaaattgtggggtgtgtgtgattcaatcgaggagtgtaattgtgatgtgctgggaacagttttcgattgaattggtttttgggcactagatagcaatggccacggtggagaggatcctgttggcgctgcaaaatgagggtgcaggaggagaataccttgttggggtcaatcaaaattgctgtgatgcccatagttaaagtgttcaccatgtgctccttgggactccttatgg

SEQ ID NO: 8191 - DNA, 272 bp, Glycine max
  Clone ID: 701100863H1
gtttgttgttgtaactcgttcttcttcttttgttgttctgtgtttgtgtttgttttttctctcacctgaaaatgtcttgctgcggtggtaactgtggttgcggaagctcctgcaagtgcggcaacggctgcggaggctgcaagatgtacccagacttgagctacactgagtcaaccaccaccgagaccttggtcatgggagtggcacctgttaaggctcaatttgagggtgctgaaatgggtgtgcccgctgagaacgatggctgcaaatgt

SEQ ID NO: 8192 - DNA, 276 bp, Glycine max
  Clone ID: 701100864H1
gtttcagtgagtgatcggtgttcacttgatccttcataagtcgtcatcatcatcatcatcatcaccgttgattgaagaagatgccgatcagaaacatcgccatcggaaggcctgaagaggctactcaccccgacacgttgaaggcggggttggctgagttcatctccaccttgatcttcgtgttcgccggttcaggttccggcatcgcctacaacaagctcaccgacaacggcgccgccactcccgccggcctcatctccgcttccatcgcccatg

SEQ ID NO: 8193 - DNA, 273 bp, Glycine max
  Clone ID: 701100865H1
gttgattagggacgaggtgggccgggtgatgggcccgggccaggagtttccttcgtttgatgaaatccgcgaaatgcattacctgaacgcggcgattcacgacagcatgaggctgttcccaccgattcagttcgattcgaagttcgccacggaggatgacgtgttgccagatggcactttcgtgagaaagggcagtagggtaacttaccacccttacgcgatgggccgaatggaaaatatttgggggcccgattgtcttgacttcaggcccga

SEQ ID NO: 8194 - DNA, 273 bp, Glycine max
  Clone ID: 701100866H1
gatcgctgcccacagtgcaagggagagaaggttgtgcaggagaagaaagtccttgaagttattgtagaaaaggggatgcagaatgggcagaagataacattccctggcgaactgatgaagcgccggacacaattactggggatatcgtctttgtccttcagcagaaggaacatcccaaattcaaaagaaaggctgaagatctttttgtagagcacactttgtcccttaccgaggccttgtgtggcttccaatttgtgctgactcacttggata

SEQ ID NO: 8195 - DNA, 273 bp, Glycine max
  Clone ID: 701100867H1
acaaaacattacttcaagctggagaatcaccaccatgccatcacacaccttcaaccagaggagttatcatcctcactgcttgcatttaaatcccatatgtccaaatcaattgaccaactagcatcggatttgaaacccggatcagagacccccctgtccttaacatggtttggaaagtgtttcggcctcttgcccttcatcaacaaggcttttggaaagcttgttgtggatattgactacccaatgagtaaattggagatcttttccattgaa

SEQ ID NO: 8196 - DNA, 275 bp, Glycine max
  Clone ID: 701100868H1
cagagagaggcgcttgccgtaacgctaattgtgaaagaagatgcaaccaacatccaacggctctgattcgcaagcgacggagcagcggacgccgccgccccagtggatgccgatgcagtacccggcagcggcgatggtaatgcagcaccacctgatgccgcctcaacattacgctcctccgccgccgcagccctacatggcctaccaccactaccaacaacagctgccgcacgccctgcacgcgcaccatcagggatccagtgccgagaacaaga

SEQ ID NO: 8197 - DNA, 272 bp, Glycine max
  Clone ID: 701100869H1
tgatgctgtgttgtttagtaatgagctggaaatactaaccttgcgctggaaagaattgtacccttacataactgaatttgttgtccttgagtcaaattctaccttcaccggattgcctaaggctctggttttcaatagcaatagggagcagttcaaatttgttgagccgcggttaacttatgggaccattggtgggagatttaagaaaggagaaaacccatttgttgaagaggcgtatcagcgtgtagcattggaccagctcctgaagatag

SEQ ID NO: 8198 - DNA, 274 bp, Glycine max
  Clone ID: 701100870H1
ctcgagccgcaagaaggccactagctctggggagaagaatgttctcatcttcgacctcggtggtgggacttttgatgtctcccttctcaccattgaggagggtattttcgaagtgaaagccactgctggtgatactcacttgggaggtgaagattttgataacagaatggtgaaccattttgttcaggaattcaagaggaagaacaagaaggatattagtggaaatgccagagcattgaggaggttgagaacagcatgtgagagggccaagagg

SEQ ID NO: 8199 - DNA, 272 bp, Glycine max
  Clone ID: 701100871H1
aaggcattccaccagaccagcagcgcttgatcttcgccggaaaacagctcgaagacggcagaaccctcgccgattacaatattcagaaagaatcgacgcttcatctggtgcttcgactccgcggagggatgcagatcttcgtgaagacgctcaccgggaaaactattactctggaggtggagagttctgatacgatcgataacgtgaaggcgaagattcaggataaggaagggattccaccggatcagcagcgtcttatcttcgctgggaag

SEQ ID NO: 8200 - DNA, 274 bp, Glycine max
  Clone ID: 701100872H1
gttggcgttgttcagttcttctacctctctttgaacaacatctcacaattcattcaccttttaattcttctcactcacaaatcacaatgctcttccttttttccttaataataataccataataatctgttacgttacggggcccaaatgtctgttacggagctcaaggagcgtcactctgctgccaccgacaccgtcaacaatctcagacaccgtttaaagcagaagcgcctttcgttgctcgacacagatatttctgggtatgcaaggtctc

SEQ ID NO: 8201 - DNA, 269 bp, Glycine max
  Clone ID: 701100873H1
gggagcaattgtttgttggtggctaccatgtttcctatgaaggacaactgttacattagtcttgtggatttcagggacaagaagatggtgtggtgttggtctgatgtgggggctccttttgccgtggatgagaaacgggtcagggatgctattgccatggaggataataactccatttgtgtggtcaatgagtttgaggatttggggttcatggatttgagaagttctgctgccaatagcattaggtggagctccaggagtaggttgat

SEQ ID NO: 8202 - DNA, 273 bp, Glycine max
  Clone ID: 701100874H1
gtacccttgccgattacaacattcagaaagagtccaccctccacctggtgctccgtcttcgtgggtggcatgcaaatctttgtcaagaccctcactggaaagaccatcacccttgaggtggagagctctgacactattgacaatgtcaaagctaagagtcaagacaaagaaggtatcccaccagaccaacagaggctcatttttgctggaaaacagcttgaagatggccgaaccttggcagattacaacatccagaaagaatctaccctccac

SEQ ID NO: 8203 - DNA, 151 bp, Glycine max
  Clone ID: 701100875H1
agattaatcatcttacttatttattctccgaaaatggttgatttacattggaaatcaaagatgccaagttccgacatgccttccaaaactctaaaactctctctctccgacaacaagtccttagcctctttgcaactacccttccacacaa

SEQ ID NO: 8204 - DNA, 271 bp, Glycine max
  Clone ID: 701100876H1
cctccttacactccccacccagtttatcactctcctccaccacctcctaccaacaagccttacatctatgcgtcacctccccctccttaccactattagctagcatagctctatggatatgaagaatatgtgcaacgaataaaagaaagcgatagaaaaggaagaagaagcgcttcgcgatgcacgaaagagaagaattggaagcaaagtttcggcgttttgtcttttataaaaaaaatgttaaatcattataattttctatgatagggat

SEQ ID NO: 8205 - DNA, 269 bp, Glycine max
  Clone ID: 701100877H1
taaaaattggtcaaaatctatcctatctctttgcatattctttcttatcatcatcttcttctctcttgcctccagaattgaaaagttcttcctctgcccatagtctttgacacccttttccaatctctagtttttttattttcttccctctataattatctccttcacaaaccttctatccctcataacatcaattaccacaaacccaagccttgtacctctcaaagtttgattcttttctcttgcccaaagcgatttggattgctata

SEQ ID NO: 8206 - DNA, 269 bp, Glycine max
  Clone ID: 701100878H1
tatcatcagagctttgtgaaacataaagttaaagcatggcatattgcagagggagcaaaccgaatatttcaaaacttgttctactttttattatcactgttgcatttatttcagatatttagtatttgcctacaagtttgttctttagtttaaacacagacaagacgactctttatggcggctataaccaatttgaacttttcttccttgtgtaaaaaaaggttttgtgtgcgtttgtgcgtgttggagttggctttttgaagtgggtg

SEQ ID NO: 8207 - DNA, 271 bp, Glycine max
  Clone ID: 701100879H1
aaacactgaaacaagaaacagaaaacactctctttctctctctttctttagattatactactatcataagatcgttgttttacttagaatctgaactcaactcgccggagccaacaaatctcgccggaatattcctccgggaaatggggtttctgaaaaactactgagaattaacaaaaaatgggcgacgaagaagtattcgccggagcttcgggtctccggcgagcggtggagctaatcttttccgtgctctcactctcgcactcgattc

SEQ ID NO: 8208 - DNA, 272 bp, Glycine max
  Clone ID: 701100881H1
ccagagagtacgtgagggaaacatttgcgtggatgcactattactggttcctcaccaacgatggaattgagttccttaggacttacctcaaccttccatccgaaattgtccctgccactctcaagaagcaggccaagcccgccggaagaccattcggtggcccacccggtgatcgccccaggggcccacctcgctttgacggagagaggagattcggcggtgaccgtgatggataccgtggaggtccacgcggacctggcggtgatttcggt

SEQ ID NO: 8209 - DNA, 272 bp, Glycine max
  Clone ID: 701100882H1
gtgatgctggttttgttaagatgattccaaccaaacccatggttgttgaaactttctccgagtatcctccacttggtaggtttgctgttagggacatgcgtcaaactgttgctgtgggagtcatcaagaacgttgagaagaaggatcctaccggagccaaggtcaccaaggctgcccagaagaagaagtgaatcgtgcgggctggttcatcaggggatgttggttacaataaatgttggtttcttttctgtactcttgtgtcttcttttcta

SEQ ID NO: 8210 - DNA, 271 bp, Glycine max
  Clone ID: 701100883H1
aacacactctgtgaaaaagggggagtttcttattccttctagacgcttccattgatcggcgatttctgatacatggcggacatcacgaacacgaggaagtgaagggtgagtccttgttggagaagatttctgggaagatccacgaccacgattcctcgtcttcgtcggattccgacaacgacaaaaccagcgccactgattccttcaagtctaatgttttcaggcttttcggcagagaaaagcccattcatcatgttcttggcggtggaaa

SEQ ID NO: 8211 - DNA, 273 bp, Glycine max
  Clone ID: 701100884H1
gttttcacctcctccaggggatccaccaagacccttggcaacttcgttaaggctacttttgattgcttgatgaaaacctatggattcctgacaccagaattctggaaggagactcgcttctccaaatctccattccaagagtacacagatctattggcaaaaccaacagggaagactctaatcttggaggaggaaagggtggatgcttgatttgctagttttggttttatggatgttttagagacattgttatttacctttgttggttctgtg

SEQ ID NO: 8212 - DNA, 290 bp, Glycine max
  Clone ID: 701100885H1
agaattcggctcaaggaaagagagtgattctacattacaacacctcaaggggaagaatgctgatgattatcaagaagccactgaaatcagagatcatacagaagcctttcaaaagcaaacaggagctagcatcattggcttatttcaaatgcaatatttgaagtcacttaccgtaggcgttggcttgatgatactgcaacagtttggagggattaatggcattgttttttatgcgaactctatatttatatcttctgggttttacagaagtattggagcaatagcaattg

SEQ ID NO: 8213 - DNA, 274 bp, Glycine max
  Clone ID: 701100886H1
gccataacgcataagccatatctccttttcccttctctttgattatctttcttttaaattcctgtttggttcaaatatagaaaccagaagaggattagtaataatcattgacaattgtagtgaagtgatgtcaatttcaaggtctcaagtggggtgtctattgctgatactactaagtatttcggttttgaaccatcaagtattgggtgctcggtatgtaaaagaagaagtggaacatttgctcaacaagtctgcagtatggaggaaaagcttt

SEQ ID NO: 8214 - DNA, 274 bp, Glycine max
  Clone ID: 701100887H1
gacagatcttgctctttcatcttttcaaatctgtcgccttgacttccctttgctaaaacacaccatccgctatggctgagcaaaataacaatcgggtgagttcggtcggttgatcgggttacattgggcgggctcggtttggacatttgtttccgtcgaaaaccaaacccgcctgtaataaaatattaaaaagttcaagtgaacgtcagaatttcagaaagtgagttgtagcagtcccgtcccctcatgtctccatttttgtactattataata

SEQ ID NO: 8215 - DNA, 274 bp, Glycine max
  Clone ID: 701100888H1
gccgctgagacacgaagagtaactgcctcgcaacgccgcccttgccatcgcgacagagtgtcgtacacagcggactccctcgcgacgccatcctcactgtgccgtttcaggtgtttgacgaaattccccataaacgaagctcatgggcaagaaaggaggggccaaaaaattagagtctgtgtctcacactccaatatcattgagggaagaagccaccggaaaaatacaaaccaaggcagcctcaaacaccaagtccaaattgagatttgagcac

SEQ ID NO: 8216 - DNA, 271 bp, Glycine max
  Clone ID: 701100889H1
ctcttccctctttctcgctctcaccttacacctctctgtttccctcttcatttcgattcttctgcttctggcaagcagtttgtgatgaagattgagtaagagatttattttttctatgaggtcaatcaaatcatggaggtggtccacgagaaatctgagtttcttgcctaatgggaaagtcaagtttgaagatgaaacaactgccttttatggcggttgtttgtatagtaatgttgtttgttgtgtataggactctaaagtatcaaagtta

SEQ ID NO: 8217 - DNA, 269 bp, Glycine max
  Clone ID: 701100890H1
gctgctattgaggctgcgacatttgcccaacagtatgattctgtgggatgggctccatgagactacaatccagatgccaaacaatctactggtccagaagttggtgctccacaatcaggctttgtttgggatgaagcatcgggctattactatgatgctgcttctgggttttactatgatggaaatactggtctttactatgatggtaataatgggatttggtattcatatgaccaccaaactcagcagtacacaccttgcactgatca

SEQ ID NO: 8218 - DNA, 271 bp, Glycine max
  Clone ID: 701100891H1
ctcgagccgccaatatattccattctctctgtgtatttccctacctctcccttcaagatgcagatcttcgtcaagaccctcaccggcaagaccatcacccttgaggtggaaagctctgacaccatcgacaacgtcaaggccaagatccaggacaaggaaggaatccccccggaccagcaacgtctcattttcgccggaaagcaacttgaggacggccgtacccttgctgactacaacattcagaaggagagtactcttcacctcgtcctcc

SEQ ID NO: 8219 - DNA, 185 bp, Glycine max
  Clone ID: 701100892H1
cttctttcttctctcaccttttcctctctcaatttcctttcccttttgaaattatgatataagagaacaaaaactcccccttaaacagataaggtatatataagccacccttcagagcaatttgtccatcttcttcaatttattagcagaagatgtggtgcattagattaccttagtctttgtcc

SEQ ID NO: 8220 - DNA, 270 bp, Glycine max
  Clone ID: 701100893H1
gaattctctaaaagagatctttttctgctctttgaagaaagaagggtctttgcttgattttcgagatgtctctgctctcagatctcatcaaccttaacctctccgataccaccgagaaggtgatcgcagagtacatatggatcggtggatcaggaatggacctgaggagcaaagcaaggactctcccaggaccagttagcgacccttcagagcttcccaagtggaactatgatggttccagcacaggtcaagctcctggtgaagacagtg

SEQ ID NO: 8221 - DNA, 272 bp, Glycine max
  Clone ID: 701100895H1
cgccaaccttttctcttgtcactctctacaaccttttctagcattgaaaattcttttcagaatcccccctgcttgtatcaaaatgttaaacaagtatgtccacacgaacaaaagcaatgcctagcatctggttacccataattatcaataagcttgtaagatgtaaccattttctatgtgcttatactgtgataaagaaaaagaggcaaataaattcaattgtttgccccattaaagaattaggcttgtttgcaatatttgatggccactta

SEQ ID NO: 8222 - DNA, 271 bp, Glycine max
  Clone ID: 701100896H1
tctccacctccggccgccgtggatgccgacgccgccgggagctccggcatctcaccgtcggaggattgcgacggcgagggcggcgacgaggaggagccgctgatccagatggcagagtgccgcatctgccaggaggaggatggcgtttccaacttggagaccccctgcgcctgtagcggcagtcttaagtatgctcacagaaagtgtgtccagcattggtgtgatgagaaaggagacataacttgtgagatatgtcatcagccatatcaac

SEQ ID NO: 8223 - DNA, 289 bp, Glycine max
  Clone ID: 701100901H1
cgaaagggaatcgggttaaaattcctgaaccgggacgtggcggctgaggcatccatcggcagttagagacagagagagagagaaacaaaaccctaattggtgagtggcgaaaatggcgcagcaggcggcggcagcagcagcaacaggagcagcagtaatcgagcaagtgcagtgcttcgggcggaagaagacagcggtggcagtgacctactgcaagcgtggtcgaggcctcatcaagatcaatggctgcccgatcgagctggtggagccggagatcctccgtttcaag

SEQ ID NO: 8224 - DNA, 288 bp, Glycine max
  Clone ID: 701100903H1
cttctttttactctctctctgtctctctctacgctttctcgttcgagatccctcaagggatccactaactgaaggagaaatggggttgacattcaccaagcttttcagccggcttttcgccaagaaggaaatgcgaattctgatggtgggtctcgatgcagctggtaagaccaccatcctgtacaagctcaaacttggagagatcgttaccacaattcccaccattgggttcaatgtggagactgtggaatacaagaacattagtttcactgtctgggatgttggtgg

SEQ ID NO: 8225 - DNA, 292 bp, Glycine max
  Clone ID: 701100904H1
cacaacacaacacagcataccgtgtttcattttctctcacacacaaacctccttcgttttcatttacttctcaggaggtataactactatttttcgctttttttttaaaaaaaaaattgattaaatcttttgccatgggaacccagattttgcgacctcaggactgcttggtagaacgaatcagggctcctccggctgacttttcccggcggaggagttccggtaattactgtaattattattactacaacaacaacaacaaccatgtcgccacttccaggtcgtgccggaa

SEQ ID NO: 8226 - DNA, 293 bp, Glycine max
  Clone ID: 701100905H1
ctttttgctgtgattgctgactggttccaaaataattgtgatcttatgcccataaaatcacagttagatagtctaattagagaaggctcctcagaatggaggaacttatgtgaaaatgatgcctacagagagcggttccctgacaagcattttgacctggaaacagtcattcaagcaaaaatacgtccgcttactgtggctcctgggaagtcctttattggtttttttcatcctgaagggatggatgaaggcagatttgactttctgcatggtgccatgtcttttgataatat

SEQ ID NO: 8227 - DNA, 292 bp, Glycine max
  Clone ID: 701100906H1
ggccaatctccaattgcaattgcggaagacacaaaactcgaactctgaattacttttggctgtgacagaccttgaagcaatgctggaacaaaagaataatgaaatattggatctgtctaccaatacaaaatcccagaagattactaaagagcatgatgatgccacagaattagatcgcttgcggcaaaaaattgcagaccaggatgaagaaatagacaattactacaagcaacatgaagagctaagtgagcaaataaaagaactcactttggagtatgatcttcttaagaag

SEQ ID NO: 8228 - DNA, 291 bp, Glycine max
  Clone ID: 701100907H1
atcttttccaaggtgctgaacctgatcctcccttcactacaggagatcatcttattgaaaacgctggtaaaatggttcttttggataagttacttcctaaattgaaagagcgcgattctagggtccttatattttcacagatgactaggctactagacatactcgaagattatttaatgtttcgtggatatcaatattgtcgcattgatggaaatactggtggggatgatcgagatgcttccattgatgctttcaacaaaccaggaagtgagaaatttgtcttcttgttat

SEQ ID NO: 8229 - DNA, 293 bp, Glycine max
  Clone ID: 701100908H1
gtggagaagaagaagctcggagtcgaagaagacacgtcacaagagtgtaagtaagcaatagcatgaattcggtggcgatgacggtggcgtcaatgttgttcgccggcggctgtcgtatcctcgccgtgcctgcgcgggcgcgcgccatccgcatcccgcgagcagctctcagcagtcaccacaacaagcacgctccgagttggggctgtcggagttcacacaacagtaacactgcactcgccggtgaagccgaattctcaacaaccgacgccggaaacttaaccgctacctct

SEQ ID NO: 8230 - DNA, 292 bp, Glycine max
  Clone ID: 701100909H1
cctcgagccgaatcggctcgaggttcaatcccttcacgctacattaggcctcactcccaaagaccctccaataccacttcttttccaactcctaaaccttttcaaactgatcatcatcatggtcatgatcagaaaacttccgatcatgaccatgatcatgatcatgttaacattcccgtcattgacctgaaacatgttttctcggaggatccgatcctccgagaacaagtgtttgggcaggtggaccaggcatgtcgggagtgggggttcttccaggtggtgaaccatggtg

SEQ ID NO: 8231 - DNA, 289 bp, Glycine max
  Clone ID: 701100910H1
atcagaataaaaaagataattttggtagtgatgcaccacattttcagagtggagttctccgtaccaactgcattgactgcttggaccgtacaaatgttgcccagtatgcttatggtcttcaagctttaggacgccagctccatgcaatgggtttgactgatgttccaaaagtggatcctgatagtagtattgctgcagctctaatggatatgtatcaaagtatgggagatgctcttgcccagcaatacggtggctctgctgctcacaatactgtgtttccagagaggca

SEQ ID NO: 8232 - DNA, 142 bp, Glycine max
  Clone ID: 701100911H1
agaaaccctctcgaatgactgagtcaatgcccgccgtggaaccgtcgccggagcctccggcgtccgatatcgtgttcgatgacttctccaccgacttcagcgccctccccatcccctccatggactcgctcttcaacacaac

SEQ ID NO: 8233 - DNA, 289 bp, Glycine max
  Clone ID: 701100912H1
aagaaagtcacgctggcggtgaagaacgtttctgcggcggccgaggaggaggaacacatgacgctgatttccgatgttgagaaccttgcggatgccgaaatccccgacaccgcacatcaaattagcaccgattcatggtttcaagtggggttcgtgctgacgacgggaatcaacagcgcgtatgtgcttggatattctgggaccatcatggttcccctgggttgggcagggggtgtggttggtttgattctcgccactgcaatatcgctctacgcgaatgctcttattg

SEQ ID NO: 8234 - DNA, 288 bp, Glycine max
  Clone ID: 701100913H1
ctttcctttttatccttagtataagagagactactagtttaggacgaaatttatggtttacttcggagaataattttaaaatatcatcgaacaagcagttagagttgtgaggcgcttttagccggagttgcttctctcatcgtcagttctcgttacgttggtcgaccgactgtgtgcagctgattttgcaaagagaagagggaattttgttaggatagttgaatactgataagagaaataacgggaaacaacagacatggatactggtggcaattctttaccatctgc

SEQ ID NO: 8235 - DNA, 290 bp, Glycine max
  Clone ID: 701100914H1
cttctctgcagaaaatcgaatcaatcgatggatgctttaatttcgtgtggttattgaggaaatttcatatccgcaagggcagagagtagaaggaagaagagagaaagagggaaggtaataacaaatccctcgctagagcctagaactagaattagattctgcctgtgatcatatattatattacgaaattcaattgcagctgctgctgaatcgtaatcgatcttatatctacactctaccatggacattgatgatgatttcacattttgtcaggtcagtgcacctgttga

SEQ ID NO: 8236 - DNA, 288 bp, Glycine max
  Clone ID: 701100915H1
cttgctttgcctgcaccaccaatgcctggaatgggaggcccaggaggtatgggaggaggctttgctcctccccctccaatgggtggactggggatgcccccaatgcctccttatggcatgcctcccatgggcagcagtttttgacaagtttagcatgaacttggcccctgtgaagaccaatgtaggaacttcgaagttttgtgtagaagaatatcttgtgtgatttggatgcagcattcattctttgcttcgggtggcggtgggagatcccaatttccagtaatgtga

SEQ ID NO: 8237 - DNA, 291 bp, Glycine max
  Clone ID: 701100916H1
tgcagtgacaaacaacaagatcttttcaatgccatgggctccatgtatgctgctgttctccttattggcattaagaatgctaatgcagtgcagccagtggttgctgttgagcgaacagtcttttatagggaaaaagcagccggaatgtattcagctttaccgtatgcttttgctcaggcaagcaaatcctcattctaaaaatcttgtctttgtagtgttactatatcctcacaaatcatcatcgttgttggaaagtctcacattgtctgtctcaatttctggggtgtagct

SEQ ID NO: 8238 - DNA, 288 bp, Glycine max
  Clone ID: 701100917H1
cctctagctctcacacacactttctctctctctctctctcacccagatcttgtagcaatggcgagcgctcccactccacgcgaagagttcgtgtacatggcgaactggcggagaggccgagcgctacgaggagatggtggagttcatggagaaggtctccgcctccgccgagagcgaggagctgaccgtggaggagcgtaacctcctctccgtcgcctacaagaacgtgatcggcgctcgccgcgcctcctggcgcatcatctcctcaatcgagcagaaggaggagag

SEQ ID NO: 8239 - DNA, 290 bp, Glycine max
  Clone ID: 701100918H1
tctccattctccaaaactgcttcaactcttctcattctctctatctctctctctgcctcacactggagtaccctcttcaatttccatcaattaagtttctctaataccctctgaatcatcatcatcatcatcatcattagtcatggctcttgtgatatattttgtgctttttcttgccctcactggccattcaagtgctctttactgtgtatgcaaagatggtgtgggtgatcaagctcttcagaaagcaatagactatgcatgtggtgctggagctgactgtaccccta

SEQ ID NO: 8240 - DNA, 292 bp, Glycine max
  Clone ID: 701100920H1
gttctctgtttggaaggcagcggaaacaaacatgtcgtggtgttactgcgctaagcctatgactttgcagttgccgttgcaaccaagagcatcatcatcattccattcccacgttggaggagtaacagtaacatcctcaacactgtctcttcgactctcttctactcttgttttcacccacaacctccacttccaacccaaactcaaacgcgcttccacaaccgttcgatgctcctcggcattgactcctcaattgaagtctaccttggatcaagttattgcttcaaataaa

SEQ ID NO: 8241 - DNA, 291 bp, Glycine max
  Clone ID: 701100921H1
gaaaattcagcatctttaaagccatggcggttgtgggagacgaaaaggagcaggaggagcttattcctggcttaccctacgaaattgcagagctgtgtcttcttcacgttccgtacccttaccaagctttgtcgcgctctgtttcgtcgacgtggaacagagcaataacgcacccttcttttattttctccaagaagaccctctcccgtcctcacctcttcgttctcgcgtttcattcacaaactgggaaaatccagtggcaggcgctcgacccttcctcggggcgctggt

SEQ ID NO: 8242 - DNA, 291 bp, Glycine max
  Clone ID: 701100922H1
atgaactcgacctgaaacaacttgaacggtttctacggttggacaacatgggtgctgagtgggacaacatggatgacctgtggatgctggacgacgtcgttgtgcccaaccgtcacttaatttactagaagggagataattaattaattaataaatggcgttttcttaagttatagttttataaaactatgttggtgtatgtgttcttagttttctgttttgtcttgtcctctcgctttggtaatttctgttttgtacggtcgaattatttcaaaattaggtgcaacgtat

SEQ ID NO: 8243 - DNA, 289 bp, Glycine max
  Clone ID: 701100923H1
ctcccacgacaacgtatcacaagctcccaatatagcaagcagcaaacatgatttcttccgtgtcctttccagcgtctcttcccgccgttaacttctccggcaacgccatggcttcgccgtcgtgccgcgtcaaatcccggccaatagtcgccttcgccaccgccactgccaccgctgaagctcgctcttcctggacggagcaaccgagaccttcctatctgaactcctcttgctcttcgctttacgatatcctcggcatccccgctggcgcctctaaccaagaaatcaa

SEQ ID NO: 8244 - DNA, 293 bp, Glycine max
  Clone ID: 701100924H1
ctcgagccgctcgagccgaatcggctcgagttcaaacaaatctcacttaattaccttttttacaaacaaaaataaggtagatctaaaaagtagccagtgcaagattttagaattgacagtattttcttataattttgctttaatgttctgtaggtgggaataatgacttgacctttcaatctagaaaaaaaatggggatactttctctgcaaaagtggtagctggaaaatttctctaaaggttctttatgtgcttgcgaggggcatgcatgtcctcttgagcctaaaccaaat

SEQ ID NO: 8245 - DNA, 290 bp, Glycine max
  Clone ID: 701100925H1
gaataatactcaagtgcaatcgcctcccgtactgaacgaaagaccatatttgagtcacccacacccacaaaacttattgccccttttacactaggcttgtcagactctcggcgatctaagttaacagcagagaggcagcaggataactatgaatttctctctaaatgcataaaagaaaatttgggattcaaaaatggtaaacctattgcagctcgtattatatacaaatgtctacttcattggcattcatttgaatctgagcgcacaaccatttttgattccataatcga

SEQ ID NO: 8246 - DNA, 292 bp, Glycine max
  Clone ID: 701100926H1
atagatttggtatttggttacaagcaacgtggaaaacctgctgtagaggcagcaaacatcttctactacttgacttatgaaggtgctgttgatctggaaacaatggaagatgatttgcaaagagcagctatcgaagaccagatagccaactttggtcagactccaatccagatatttcgtaagaaacacccgagaagagggccacctattccaattgcacatcctttgtactttgctcctgattctattagtttgacttccattgtttgtaatacaagtcaatattcatctg

SEQ ID NO: 8247 - DNA, 291 bp, Glycine max
  Clone ID: 701100927H1
tggcgccagtccttccacttctccccctccatccccggcaagtcccaccgcgacgccacgcgcctccacgaggagatggccgtcgatctcatcgaggccaagcccggcaacagaatcctggatgtgggctgtggcgtgggcggtcccatgcgggccatcgcggcccactcgcgggccaacgtagtcggcatcaccatcaacgagtaccaggtcaaccgcgcaaggatgcacaacaagaaggcagggttggagtccctctgcgaggtcgtgtgcgggaattttctcaagatg

SEQ ID NO: 8248 - DNA, 290 bp, Glycine max
  Clone ID: 701100928H1
caaagctcctcctgttatttcttggtggttggaggaggttcagaggaagaagaagatgagttaggagaaattaatattaactcttcaattttgtagtccaatacgatccatccatggtgggggaatcaagaaagtggctgatacttttggcatcaatatgggtgcaggcattcacagggacaaactttgacttctcatcatactcatctgagctcaaatctgtgcttgacataactcagcttcagctcaattacctctctgtggcctcagacatgggaaaggcctttggg

SEQ ID NO: 8249 - DNA, 289 bp, Glycine max
  Clone ID: 701100929H1
gagaaaggaggccaccagaaaagcatggcaattttctgcatcaagtatggatgcaacttatgagcctttaatttgtggtagcatataacaatcaactttggttcatcaaggtctgtccaaattcaatcaccaaatttaatcctctccctatttatgtaagtccacccactttatataccaaattgaaatttggtttgttcaaatttatcagtaagttatggtcaaggtgaatttctgcacccttttgctaccatgtttgaaaggttgagtagactaagccatgatctat

SEQ ID NO: 8250 - DNA, 286 bp, Glycine max
  Clone ID: 701100931H1
gtcagctttactttggcttgctgtgattactagcatatcactactaattgctctcaacgttgggggatccagtctcttcaatccctaaggttggacagtagatataattagatcaattttcttttatccgctatttacagtgttcgtatattcgtgagtgcttctgatggagaaaagcatctaccggcggcgcatatttttggcttcattttgtgagagctacaaattttatttcagcttaaatgtgtgtattacttgtctatatccaagcattttcttatacccg

SEQ ID NO: 8251 - DNA, 286 bp, Glycine max
  Clone ID: 701100932H1
cggtggcgggaccggtggaggagatgttggagtggctgtcgccggtggcgcaggacacgatgcggtggcaggtggagaggagcatggagacggggaggtttgaggcgaagacgacggcgttgctgctgcagacgctgcattactccgacttggagaaggcggaggcggccattgtggaggtgttggtggggttgagttgcatatattggtgtgagagaaggtgaatttagaatggagaaattttattacatggattaagaacacacatgtttatgatcaggactaa

SEQ ID NO: 8252 - DNA, 285 bp, Glycine max
  Clone ID: 701100933H1
ctcatctctgcccaaaaccctcacagtgacgccgtcatggtgccacactgccactttcactgattattcgtcgacggttccaactcaacaatttgtcatctctctgcgacttctacttacaagtaacaagttgttggaacttcttacgagttaagagccatttattctgcatcctgtttttgcttcaataaaatggagacaaaatcatccagttcctctacaaacttggtagaccaatcagtgtgtcctggagatgtgattcttgatctgtctaacatgacaaac

SEQ ID NO: 8253 - DNA, 208 bp, Glycine max
  Clone ID: 701100934H1
cgcagatctaatggtttcacacactttcttcactctagatcattctcttcttcatcatggggcaccccaatagcttctactaatcgatagtcaaattttgttgggttcggatgccggtggtagacaggatggactattgtggtacaaggactcggggcagcacttgaatggggatttttcaatggctgtaatccaagccaataacttg

SEQ ID NO: 8254 - DNA, 289 bp, Glycine max
  Clone ID: 701100935H1
aaaacgttaaggtgcccccacaaacacaactaccacctttgctaataaaaaatatctccttttttccattttcattttgaatttcctttcatcttctatatgttattgccattgctacacaaacaatacaaaacaccaccctttaaccgtttgcaacggttgctttgaacgaagggagcagtaacggctatgttataatttctgagtttgtgttgtagagagaagttacgttctgagaggccaagatggattttacttcgttcttgacgtccctggggacttcctttgt

SEQ ID NO: 8255 - DNA, 263 bp, Glycine max
  Clone ID: 701100936H1
gcaaaaggccatataattctctcttatttgaaataatgtccgggatcatccacaagattgaggagaatctcaatgtgggagggcacaagacagaggagcacaaaggagaacaccatggtgagcacaaaggtgaacacaaaggagaacaccatggtgagcacaaaggtgaacacaaaggagaacaacaccatggggagcacaaggagggacttgtggataagatcaaggacaagatccatggtgatggccatgacaagggtgag

SEQ ID NO: 8256 - DNA, 289 bp, Glycine max
  Clone ID: 701100937H1
ctgaaacggagtccctagcaaatgttacagagatacatgatggttcggatttttcatcaaatgatgatggaggatactcctttggaattttctgtgtgaaattctcaaaagatgggaaagaattagttgcaggaagtagtggtgattctatatatgtatacgatcttgaagcaaataagctctcacttcgaattttagctcacacgtgtgatgtgaacactgtatgttttgctgatgaaactacccactctatttactctgggagtgatgatagtttctgcaaggtctg

SEQ ID NO: 8257 - DNA, 290 bp, Glycine max
  Clone ID: 701100938H1
cggggagaatcctccgtcttgcgaaacagttaggaagggagtctttgctgccggtgctgcttttgttttcttcactgccataatctctgaattctactatatcaactactcaagggcaagggaaagcttccaaccttatgctggcggcgagactggtgtcggtatgggaacctacaaatgagcttctagttaagaattttacagcaaacatttaggtgtgactatatctggagtctggattctgcagcacatttccttgattttagtgcatttattgtatttactgtcta

SEQ ID NO: 8258 - DNA, 291 bp, Glycine max
  Clone ID: 701100940H1
gcacattccattgcagcagatccacaccttcgctttcatcatggccgaatttctggatctcgaatcccaagacggcgttcgaatgccgtggaacgtgatccccggcacgaagcaggacgcccaaaacgccgtcgtccccatctccgtcgtctacactccgataaagcacttcccctcgatgccggtcctcaactactcccctctccggtgccgcacgtgccgctccgtcctcaaccccttctgcatcgtcgacttcgccgtcaagatctggatctgccccttctgcttcca

SEQ ID NO: 8259 - DNA, 290 bp, Glycine max
  Clone ID: 701100941H1
tcctcgtctatgctgaaaaacgagaaggagatactcgattgccttggagcttccccttatgtcatcaaatgttcggccatgatcacactgttgaaaacggagaagagtattacaacattttcctcgaatacgccgccggtggttctctcgccgatcaggtcaaaagacacggcgggaggcttccggagtcttacgttcggaggtgtacgaggtcgatcgtcgaaggtctaaaacatattcacgacaacggttatgttcactgcgatgtgaagcttcaaaacattctcgtt

SEQ ID NO: 8260 - DNA, 285 bp, Glycine max
  Clone ID: 701100942H1
agaagaagattttaagaaggcttttaggatgggaagagaaacctttgacatgatctgtgaggagttgaattcagcaattgtgaaggaagacaccactttgaggaatgctattcctgtgaggcaaagggtggctgtgtgtttgtggcgattagccactggggaccctcttaggattgtttctaagaggtttggtttggggatatcaacttgtcacaagcttgttcttgaggtttgcaccgctattaagtctgtgcttatgccaaagtacttgaattggcctgatga

SEQ ID NO: 8261 - DNA, 288 bp, Glycine max
  Clone ID: 701100943H1
ctttgcaatctacacaatattcagtattcaccatgggagccacaacttttacacatgattattcatcccctgttgctccatcacgcatgttcaaggccttgatcactgactctagaactttgctgccaaagctcttaccacagatcaaaaaagaggtcaatctgatccaaggagatggggaagctggaagcattgagcaagttaactttgctgaagctttccccttcaagtatgtgaaacacaggattgatgaggttgataaggacaactttgtgtgcaaatacacta

SEQ ID NO: 8262 - DNA, 288 bp, Glycine max
  Clone ID: 701100944H1
ctcgagccgtgcctttgcacaacatacacgtactcctatcctagctacttactctcacttcactcaattcctcaactctctagctcttatggaaactcaacaccaacaacccaccatcaagtctaggttcagacgcatctgtgtctactgtggtagcagccctggcaaaaaccccagctaccagctcgctgctattcaactcggaaaacaactggtggagaggaacattgacttggtttatggaggaggaagcatagggttgatgggtctaatctcacaagttgtgta

SEQ ID NO: 8263 - DNA, 285 bp, Glycine max
  Clone ID: 701100945H1
ctagtatagttagagatatcactactacaccaccctgcatagtttgttcagctataatactacttgagcttctttacctacttttcaaacctacattgcacacaaaatggcaacatcttggtcatgttatctacttgcattgcttctttttatgtcaactattgtatcagagagtagagtggcaaggaaggacttgggcctggaccttggtgggttgggggttggacttggactgggtttgggcctggggataggaggtggcagtggctctggagctggtgccgg

SEQ ID NO: 8264 - DNA, 289 bp, Glycine max
  Clone ID: 701100946H1
ccagctcgacctctagcgctttgtcccacaaaagatggggttcactcccacaagtagtagcaacaccgcttgcttcccaataggacctctagttgtgctatggtgtcggaagctactaaagtgggtgtggctgaggccaaagagattggagagagcattaagggcacagggccttcaggggaatccctacagcctcttgattggggacactaaggacatgtacacagtgctcatgcaagctggcagatcatgatgatttcacattttgtcaggtcagtgcacctgttga

SEQ ID NO: 8265 - DNA, 286 bp, Glycine max
  Clone ID: 701100947H1
tacagagcactatacattctcaactggatctaccgctactttaccgagcctcactttgtccattggataacatggatttccggccttgttcaaacactactctatgctgatttcttctattactatttccaaagctggaagaacaacaaaaagcttcatttgccagcatgagtgtattcttctgttcttaaaaacaagggtctatgtggacaattaacagtgagcagagaggatccacaaatttgtctggacatagtggtttctgatttacaattgcctatttgtt

SEQ ID NO: 8266 - DNA, 287 bp, Glycine max
  Clone ID: 701100948H1
gagaaaggaaggaaaaatggagttgttcttctacgcggtgttcggcggtttgggagcggttgttgcagtgacggagctgagcaagagcaacaaggaccgaatcaacacctcttccgcattcaattccttcaagaacaactacctcatcgtctattccctcatgatggctggagattggctacaaggtccatatgtctactacctttacagtacatatggatatgggaagggagacataggacaactcttcattgctggttttgggtcttccatgctctttggaacaa

SEQ ID NO: 8267 - DNA, 288 bp, Glycine max
  Clone ID: 701100949H1
agcgccgcattactcctcaactgatctgggaaaataaggcgtctcttcttaccagctgctgctaatgtttttcctgcctgcaattttccatcttccctgcagaaatttccaaaacaaatagttgttggtgatttgtcaacatgaagaagttgttagattttgggaagaaagccctcttttatgttagggtgctttctggatatgaagagcgaagaatacgatcttataggctgcagcttgagcaacgtgtacaacaggcacaagcaaggagggcggccataaataaag

SEQ ID NO: 8268 - DNA, 285 bp, Glycine max
  Clone ID: 701100951H1
gaatggcaaagttaataaaattctttgagttgaacacaggggccaagattccttctgttgggttaggcacatggcaagctgagcctggtgttgtagccaaagctgtcaccacagccattctggttggatacaggcatattgattgtgctcaagcgtataacaatcaagcagagattggttctgctcttaagaagctttttgatgatggtgtggtgaagcgtgaggacttatggatcacctccaaactctggtgttcacatcatgcttcagaagatgtgcccaaag

SEQ ID NO: 8269 - DNA, 244 bp, Glycine max
  Clone ID: 701100952H1
cggctcgaggtttttaagttggacctgcacaatttccctatctataagagaagcaaagtatgtacaatatttgatctctatcataagagaagcaaagtagatacaatatttgttaggggtgttcatggtttgattaggttggattttttgttaaaaaatcatccaaatcaaacttaaaaaacttgtgatttggttcgattcagttttcatttaaaataaaattcaaatcagaccaagttaatat

SEQ ID NO: 8270 - DNA, 288 bp, Glycine max
  Clone ID: 701100953H1
cgttggtattgatattgatggttctttatgtggatgcacaattagaactacacatggtctaccttgtgcgtgtgaacttgctaagtatagtaggacgtggcacccaattcccttgcaagcaattcatgttcattggaggacattaaacttcagtgaccaagaaatgaacaatgaggggctcgagttagcgttgcaacgtgaagtggatgctttgcacaatcaatttcaggaacttgattatgctggaaaaattactttgaaggccaaattgcgtgaactagcatttcc

SEQ ID NO: 8271 - DNA, 288 bp, Glycine max
  Clone ID: 701100954H1
attacagagcattttccaacacgattacacgacagaatcaaacccctctttctctccgaagctgcttttaatatcgtactggccttcgattgttctcctctttaatacatactgttctctcttcgatttgagggaacagtacaagagtctgagcatcggttaacccaactgcacaggtagtctccaaataatggagcctcatgatgagactggatgccaggctcctgaacgccccattctttgcattaataattgtggcttctttggaagagcagctaccatgaacat

SEQ ID NO: 8272 - DNA, 292 bp, Glycine max
  Clone ID: 701100955H1
actcgagccgaatcggctcgagcaaacatacatagagaaattcactactataaaaatcatcaactcaaataaagctagacctacaaagatccagaggtagctacggagagaaacaaagctcatggctggtttgcaaagatctgaggtgtctttcaggagacagggttcatcagggcttgtttgggacgacaagttattatcaggggaattgaacaagaacgaagacccaaagggtgctcatggtggtgaccttaaccttaaccttaacgttagaacaacaccacccatccag

SEQ ID NO: 8273 - DNA, 191 bp, Glycine max
  Clone ID: 701100956H1
ccgcaagatggggtatggtgaaggctttcagtggctctctcagtacattaaatagagaacaagtgtttgctctttattatcctcatgctaatgtagtctccacattagcgtatctctgctcatgtaaattggatatactttaatggtggttttactttttctttgttatgaatgagacatactagtttcta

SEQ ID NO: 8274 - DNA, 290 bp, Glycine max
  Clone ID: 701100957H1
ctctccctcctcctcttcagagtagcattgttcattcacactccctctctggttttcattctttggcattgcgaaaaaacgaaaactcagaaaaccgcaacaaactcacactcactcacaagaagtagtaacaacatcaacaactctctcatcatcatggcagttgaggctcctccgcacaacatgaatctcttcccctcgcagttactaacctccagagaaacgatgaaaccgaatctcggcttctacaccgcgcagaaacggaaggcggcggtggcgccgcgccgcca

SEQ ID NO: 8275 - DNA, 288 bp, Glycine max
  Clone ID: 701100958H1
cacaaaagctttcattgctcctagcaattcacaacaacccttcttttttagctttcacgaaactttccaacaatgaattcctcaaaggcatgcacccttttgaatttggtagcggttgttatgttcgttgccattttgattagccaaagtagggtggaggctagggttttatctcattcggaggaatttgcatttgcaagagctaataatctccaaacatacacctcatcagcctatgagcaagccaagaaaaccatgggtttttggatgcagcgtttggcttctgga

SEQ ID NO: 8276 - DNA, 282 bp, Glycine max
  Clone ID: 701100959H1
ttttctttaatcaaacgctctaccacttggtctaaatccttatcttagtttccttctgtgtgtctctaggagcatcatccttatctgtctgaggttgcatcagcaaaggtgtcttcgaaggttcaacaagatttcatcagcgagcacttattttactatttctcaaggtacatacagaaagtttgtttgagctaagtgagtaaaaggagaactatgtcattggttatatctgcagagttggctgatacatcatatggaaatgccaagctctacacactaaag

SEQ ID NO: 8277 - DNA, 298 bp, Glycine max
  unsure at all n locations
  Clone ID: 701100960H1
gaataggctctagcacacattgcagaacttactttcgcaatattaatatgttctacaaattggactaaccatcattaaggcctctccatctccaagtcattcttacaccacgtctttctggtcatatttatgatgaaatttaaaacctanaaaaataagataacatgtcatgcatggataaattaggaatgcttggcttttatcgttttgaataaattacgaatgctaagattttattatttaaataaaataggaatataaaacctgggattaaggaaaagattagtcaaatcctgag

SEQ ID NO: 8278 - DNA, 286 bp, Glycine max
  Clone ID: 701100961H1
ttttggtcccactgggctgacaactgaggttaagtctgttgagatgcaccatgaggctctcacagaggctcttccaggtgacaatgttggctttaatgtgaagaatgttgcagtcaaggatctcaagcgtggttttgttgcatccaactccaaggatgaccctgccaaggaagctgccaacttcacatctcaagtcattatcatgaaccaccctggccagattggaaatggatacgcaccggtgcttgattgccacacttctcacattgctgtcaagttttctgaa

SEQ ID NO: 8279 - DNA, 288 bp, Glycine max
  Clone ID: 701100963H1
gacacataaccctcacaaagaaagcaaaggcataccaagactacaacaactatgggtagcgatgcccctctgacgagtaccaagtgtacgacaccccagtagaggcaacatatcctaggcaaaatcatcacaagaagggtcatgtggcattcagaaccaactatgaggattctatagctgaagtagaatacaacgttgaggctcgagaacataacagcaggttatggaatcacagtgcttacaaaagcgtggaccaagaggctgaggcgtttattcagtatgagcata

SEQ ID NO: 8280 - DNA, 284 bp, Glycine max
  Clone ID: 701100964H1
aacacagtttgcttatctggctaccttttgcactatgtcctgactcatactcaaattcaaggtgcctatgttacttatcttggagtttctcttgcctgcatgctggtgtttttcattggtttgggaagaatttatcttggcatgcatagtgtggttgatgttcttgctggccttcttattggactcgttgtccttgcattttggcttacggttgatgaatacatggacagttttgtgatctcaggacaaaatgttacgtccttttgggctgccttgagctttct

SEQ ID NO: 8281 - DNA, 148 bp, Glycine max
  Clone ID: 701100965H1
atctatgctattaagaggtggaacgaaagcaccaagtacttcctgcaggataattggcagagaacttgggtattgctactgtggattggcgtgaagttaggtctatttgcctacaaatttgtgcagtatagaagacaacctgcatatg

SEQ ID NO: 8282 - DNA, 283 bp, Glycine max
  Clone ID: 701100966H1
cggaatgttgtttcaggtgatgaagtttgaggatctaaaggcacttggtagtgagtcagctgtgaaggtatgaatttattcttttgatgcaacgtattgctgttgcttcctaaaatgttgtcacagtgaccagcatcagattgataactgggtgataaaacggagaaaaatagcccatatttttctagaatttgctggaaaagtgaggaaagatcctcactcacctgggtaagtcgagatagaaattcaggtctaataccttaggttaatttggctaaaatat

SEQ ID NO: 8283 - DNA, 280 bp, Glycine max
  Clone ID: 701100967H1
gacgaaaggaaagaagaagaagaagcgttctttcggagagttcgaagatgtcgggcgttaccaacaacaacgaggaagacaagaagccaaccgaacagggagcacacatcaaccttaaggttaaggggcaggatgggaatgaagtttttttcaggatcaagagaagcactcaattgaagaagcttatgaatgcttactgtgaccgacagtcggtggatttcaactccattgcttttctgtttgatggacgccgcctccgagctgagcagactccagatga

SEQ ID NO: 8284 - DNA, 285 bp, Glycine max
  Clone ID: 701100968H1
ctcaataatgatctatttgcattgtttcgggcgttaccctttttttttatatttattttgtaaagggaacaatttttgcaagtgaaacttgttttttcatttgaggattttgtttagtatacctgctgtgcttatggacggtcttgtactgattcgttatgtcatcagcacaaaacataaacctaagctacatctaatgttgccaccatgaattttttgtgtgttccaattcatatgggaataacacttctgcattgtggcaaaagttataattactttctaata

SEQ ID NO: 8285 - DNA, 288 bp, Glycine max
  Clone ID: 701100969H1
cttcgaactgttggaaatattgtcactggagatgatatgcagacacaggttatcatcaatcaccaggctcttccttgccttctgaatctgttgaccaataattataaaaaaagcatcaagaaggaagcttgttggaccatatcaaacatcacagctggtaataaacagcagattcaggctgtgattgaggctaatctaattgctcctttggtcaatctgcttcaaaatgctgagtttgatatcaagaaagaagctgcttgggctatctcaaatgctacatccggtggt

SEQ ID NO: 8286 - DNA, 286 bp, Glycine max
  Clone ID: 701100970H1
acaaatattaggttggttgcaccagagtctggtaattatgatcataaactcccaataggcaaggccatagaaacaaagcgattcgatatctgtcagcctacgtcacatatgggatttgagaaattctcttttgttccctccgatgctcattcggtttcaggtcaagcacacggaagaaatccagttgtggagtctcttccccaaagcaaagatctaaaggatgtcaatgaattgggtttatgttgctcaagaagtacagatgatcagtcagtgatgcctgggataa

SEQ ID NO: 8287 - DNA, 282 bp, Glycine max
  Clone ID: 701100971H1
cttgtatatgagcctccaagggatggtcccacattgtgggaaattagtattcctgatagatccgctgcagaattttatgctcctgatcccagtccacaacatattaataagctttttatcaaccatccagacaggttcaggcagtatggattgtgggataggtattcagaattgtatcctgatgcagatttggtttacacaattggtgttagtgactatacgaaggattggttttatgcacaggctccgaggaaaaaagtggataacactcttcaaggaaca

SEQ ID NO: 8288 - DNA, 287 bp, Glycine max
  Clone ID: 701100973H1
tttaggttgggatttgggaattagggttattcgcgtggcgaagatgattgaggtggttttgaacgatcgattggggaagaaggtgcgcgtgaagtgcaacgacgatgataccatcggcgacctgaagaagcttgtggcggctcagactggcacaagagccgacaagatccgcatccagaagtggtacaccatctacaaggatcacatcactctcaaggattacgagatccatgacggcatgggtctcgaactctactacaactaaacacaacaaggtgtgttttatg

SEQ ID NO: 8289 - DNA, 285 bp, Glycine max
  Clone ID: 701100975H1
cgatcaatcattaaaggcttacttcttcttcttcttcttcttcttcttcttcttctaacaacaataagatcccatctttcccactcatgaagagacttaacagctcagattcttccactgccctcatgacaatttttccatcatcatcaacagaggaacatagtccgaggaacagccaccacatgtatggcagggagttccgatcgatgttggacggactcgacgaggaagggtgtgttgaagaaccggggcatcaatctgagaagaagcgtcgactaagtgtgg

SEQ ID NO: 8290 - DNA, 285 bp, Glycine max
  Clone ID: 701100976H1
ctcgagccgctcgagccgaatcggctctagtccgggtgatccctccgagaatgttcctcaatacccatccgtacacaacatcgcaacaaagccactcataaccactcactcatccctctctcctgtcaccgctaccgcatcactcgtcaagaagccgtcgtctcctgctacggatgcttgggcatcatttgcccacgcatccgtaacaacggagacggcggccctgaatttggaggacgcggacagctgttcgcgtcggtgtcgacgcgaaaattgctccagtcc

SEQ ID NO: 8291 - DNA, 285 bp, Glycine max
  Clone ID: 701100977H1
ttcacttcttcgctaatctctagattactcccattcattccattttgtttcattaattaaccaaataaaaaacgatgagcacttctcatcaacaacgttatctcctcttcgctttcactacgttaatagttttcttcagcttcaacactacaccagtctcagctcgtttgttccccaacgtttcctccatcccaaggtggaacacatcccacgcgccacctgatagcgcgtggaacgcgtatcgcaatttcactgggtgccgcccgggataaacatctaacggtc

SEQ ID NO: 8292 - DNA, 281 bp, Glycine max
  Clone ID: 701100978H1
ttacaagcctccccaattggacgggctttatcaatatctttcaacagtgtttgcaactgatttgcattctcgtgcatttttacggcttcctaaatctgtgggtgtggattttcgtgcctcgtgtttctgccataaacaaacaattgacatgggctatgtgtgttctgtatgcttatccatattctgtgagcaccatgataagtgttcaacctgtgggggttagcatgtcaagaaaagctatgagatgaaggcaatcccagctgattaagatgaagttttca

SEQ ID NO: 8293 - DNA, 285 bp, Glycine max
  Clone ID: 701100979H1
cttcaaatcctttaattgccaaataccaaggttctcttctggccatgggactattggtatgttcgcgggcaccggtggaccaattggcatttagtttcctgatgttcaggaagttaaagatgaccaaacaaacccggacagatatgtagagaatcacaattatcaccaccaccaccatgacggccatcaccatcaatcttcaatactatactacttactacattacaaaatgcatacgtaaaaagcagttcagtaaaggaagtgggggcaggcattcgctttctt

SEQ ID NO: 8294 - DNA, 284 bp, Glycine max
  Clone ID: 701100980H1
gccgtggcaaagcttttgaatttagtgcctctcctctctgtttacccttccagatattgcagatacagcaagatcatgagtgggacttcggaaaagaaacttgtaagaatcgatgttagttctgatactgtatgcccatggtgctttgttggcaaaaaaaatctagacaaggccatagctgcctccaaggataaatacaactttgagataatatggcatccctttcaacttagccctgatgcccctaaagaaggcattgacaagagggagtattacagaagaaa

SEQ ID NO: 8295 - DNA, 282 bp, Glycine max
  Clone ID: 701100981H1
ctccatcccgatctctttattgtcttctttctctcttcctggttttcgttggagaatcctgaaaaccgcttgattttaatcaaagggtcatcaggattcgggcacccatatctcgtatcactccttctctcctctgttgtcttagaaagaagaccaagaaaagcatcaatttttgcaagcaatcttcttcttttgccctttctcttgtctctaacatacacacacaacaacccagctgctgaagctgaagcatcacaactcacacatgattcgagtggccac

SEQ ID NO: 8296 - DNA, 281 bp, Glycine max
  Clone ID: 701100983H1
atggcaaagcttcatgaggctgccagttctaacagtgtcgatgcatataaacaatatgccatagccagtcatgaattgaacaaggcttgcaatttgcgtgggcttcttaaatttaaagagacagcagttaagattcctattgatgaagtggagcctgctagtgaaatagttaaacggttttgcactggggccatgagttatgggtcaatatcattggaggcacacacagcattagcaatggctatgaataaaatgggagggaaatccaacacaggtgaggg

SEQ ID NO: 8297 - DNA, 281 bp, Glycine max
  Clone ID: 701100984H1
gccaaattgcacaacatataccgttgtcatcagcaaagataaaagaaatagttgagatgctttttgtgaacccagagccagagaatgttaagattctagaggaaaccattagtatgtgtgaagtgcctgcaataactggagaagaaagatattgtgcaacttcattagagtccatggtagattttgtcacttctaagcttgggaagaatgctcgagttatttctacaggagcaggtaaggatagtaagtcccaaaaattctcggtgaaagatggagtgaag

SEQ ID NO: 8298 - DNA, 285 bp, Glycine max
  Clone ID: 701100985H1
gtgaggtttggtggtgtggtttagtgtcaaaatggcggcgagtagaagcactttacctctgatgaagtacttgagagtgcgcgtggacgctcttccccgcaacactcccttgaccctcacttccaacttgttgattcgccgcttctccgaagaggttaggggttgttttctcgacaagtccgaggtcacagatcgcgtcatttcctgcgtcaaaaacttccagaaagtcgatccttctaaggttaaccctaatgctcacttccagaatgaccttggattggatag

SEQ ID NO: 8299 - DNA, 287 bp, Glycine max
  Clone ID: 701100987H1
cccttgccgactacaacatccaaaaggaatccactctccacctcgtgcttcgcctcaggggtggcatgcaaatctttgtcaagactttgactggcaagaccatcaccctcgaggtcgaatcctcggacaccattgataatgtcaaggccaagatccaggacaaggagggtatccctccagatcagcagaggttgatatttgctggtaaacaacttgaggatggaagaacccttgctgattacaatattcagaaggagtctaccttacacttggttcttcgtttaaga

SEQ ID NO: 8300 - DNA, 287 bp, Glycine max
  Clone ID: 701100988H1
atttggagtttggagcgactgaactaatcattaatttgcactcgctgtttcagcttcatcacccttcttttgcatcatttatatctcttgagaaatggcacaagaaacctttctattcacatctgaatctgtaaacgagggtcaccccgacaagctgttgtaccagatctctgatgcagtacttgatgcgtgccttgaacaggaccctgacagcaaggttgcctgtgagacatgcaccaagaccaacatggtcatggtcttcggagagatcacaaccaaggccaacg

SEQ ID NO: 8301 - DNA, 286 bp, Glycine max
  Clone ID: 701100989H1
ctgctggcgaagacaggagtgcatgtgcctgtgtttccaagcgctggcttatgcatctaagcagtatttgcaaaagtgaaatctctgttaacaaaaataccacagtagagaaccctgaaaaggagggtgatgatgtagaatttggaggtaagggatacctctctcgaagcttggaaggaaagaaggcaacagatgttagactggctgccatagctgttgggacttcatctcgaggaggattggggaagctctcaatccgtggaagcaacattgtttgtggggtgac

SEQ ID NO: 8302 - DNA, 284 bp, Glycine max
  unsure at all n locations
  Clone ID: 701100990H1
gggatgtttgaaagcaacccgagagtcttctcagcaagttggattattcaaagacattaacagagatatggtgaacaataatgtgagagctattcctgaaacttcttatacacataacagagacattttatctggtggcatttcgactcctattaagatcaatgaaaagaattcaagaggagcaaagggacacaaggttgtttctgatttagtcaagcctattgacgtggtntcctggatctgagcctgaaattcaggctcctccttttactgttagtaatgga

SEQ ID NO: 8303 - DNA, 283 bp, Glycine max
  Clone ID: 701100991H1
cgttactcacatggggggtgcacctacagtgttaaacatgataatcaattcatcacctaaagtccagaagccgcttccgggaaaggtccaagtgatgacaggtggtgcaccacctcctccggatgtgattttcaggatggaagaactaggatttaatgtgactcattcatatggtttgacagaaacttttggtccggcatcaatttgcacttggaaaccagaatgggacaatctgcctcaagatgcacaagcaaaactcaaggcacgtcaaggagtggcccat

SEQ ID NO: 8304 - DNA, 284 bp, Glycine max
  Clone ID: 701100992H1
gacattgtaactagtgatggggaacatgtcgatatgcttgaacaaattggactaaccaacattaaggcctctccactccaagtcattcttacaccacgtctttctggtcatatttatgatgaaatttaaatactaaaaaaataagataacatgtcatgcatggataaattaggaatgcttggcttttatcgttttgaataaattacgaatgctaagattttattatttaaataaaataggaatataaaacctgggattaaggaaaagattagtcaaatcctgag

SEQ ID NO: 8305 - DNA, 283 bp, Glycine max
  Clone ID: 701100993H1
agactcccttacccaagcagatcttttgagctcgctcattgttctcgttgtcgaattgattggcttcaaagagatggaattctacttcttgaactagaccggttgctcaggccaggaggttattttgcatactcatctcctgaagcatatgctcaggatgaagaggatctaaggatatggaaagaaatgagtgaccttgtggggcgtatgtgttggaaaatagctgcaaagaggaaccaaactgttgtctggcaaaaacctccgacaaatgactgctatatgg

SEQ ID NO: 8306 - DNA, 86 bp, Glycine max
  Clone ID: 701100994H1
gaagggttcactgttagttgagtaacgatgcttgccctttgccaataaatattcgtgtaggtatccaagtttctttagcagtattg

SEQ ID NO: 8307 - DNA, 284 bp, Glycine max
  Clone ID: 701100995H1
atatatcctctccaaaagcgatgaagagttattcacaccttacgttgacccctgttcatgaggaagctaagatagtaggaaaaacaagctatgccagcaacttgtctgggtatgatgaatatgttccaatggtagacatacctgttgatgctggttggaagaagcaagcatctctacagaggtcttacacctctaaaggagcacctcctcctgacactcagaaaactcctgaagggattcaagctcggatgtgggtagcactgtctatcttcttcttgactgta

SEQ ID NO: 8308 - DNA, 285 bp, Glycine max
  Clone ID: 701100996H1
ctcgagccgttccaaacaaaaacgtatgtcttggtcggtttttctccggagtcgtcttcacttttctccgagtttttattatcatcatctctctcgtgtccctgtctccatctccatctcttagtttcttcttcaaatggcagaagttgaagacatagacaaccctcatcacgaccaccatcattacctttcttcttctacaacacaacctccaatgatcaatttcccgcgagatctgttaagaaccttcgtgggagtgaacaacaacagcaataaaaacaataa

SEQ ID NO: 8309 - DNA, 190 bp, Glycine max
  Clone ID: 701101001H1
gaagaagaagaaggcgcgtggggcttggagagaggccagaggtagagcgcgtggagacgacggaagcctccgagggcgaggaccacggatcgtagctgttgctcaccgcaccctgtgtttgcccactgcttggtgcagatcagttcccatagcctctcgtcacgcgccgccttctgcacatgcttgctca

SEQ ID NO: 8310 - DNA, 268 bp, Glycine max
  Clone ID: 701101002H1
ggaagatctaacaagctctgtagcccagggtacctcagataatgatctttccatggatccagagggttcaaagtctagtaataaaaagagaaaagctttctcagataagccaacttcaaggccaatgaattcccaaaagatgagtgaatttagtactacgcctatggacgatgaattggatgttgttgatccagtgggtcagaaacccaagagacccatgaggataaagaagaatgtgaatgacaagtttgaagatgcttttactggg

SEQ ID NO: 8311 - DNA, 269 bp, Glycine max
  Clone ID: 701101004H1
cttcggttgatcccttctccgactataaaactgcaaatcccatcaaaatcctaatctttagggtttccatgtccaatccaagggattcgtttatgaagatttagcgaaaagggttgaaattgatcatggatttgggaagcgaatccgtggaagagaacgaagtacatcatgatgggaatggaaacggtggttcttatgatgacgagaagattgggttgggtttggagggaaatcggatgtcaacggttcgatcaaagggaaggttggcg

SEQ ID NO: 8312 - DNA, 134 bp, Glycine max
  Clone ID: 701101005H1
tttcatatatatgatatatccctttagaattattgaattagtgaaaacttgtgtaagtttgaatgttgagaatgataggacctttgctgctgttattgtctaatgcatgataaataaaatgtggtttttctgtc

SEQ ID NO: 8313 - DNA, 274 bp, Glycine max
  Clone ID: 701101006H1
cgagaaggagtggtacttttttagcccaagagacaggaagtacccgaatggttcacgaccaaacagagtcgcgggttctgggtattggaaagcaactggaacagacaagatcatcaccactgaaggtagaaaagttggcataaaaaaagcacttgttttctacattggcaaagcacccaaaggctccaaaaccaattggatcatgcacgagtatcgccttctcgattcttcccgcaaacacaacctcggaaccgcaaagcttgatgattgggtt

SEQ ID NO: 8314 - DNA, 271 bp, Glycine max
  Clone ID: 701101007H1
gtggtatgctccaggcattgatgaatctgttctcgctgtgttggaagccatttggccgcgatgctgctgatcgaatcgattccatcggagttaccggaagagaaggcaaagacggcttgctttggttccgcgacggcggaaaatatggctctggcgatttctccatggccgtcgttcaggccaaccaggttctcgaagaccagagccagatcgagtctggtcctctcggcaccttcgtcggcatctacgacggtcacggaggacccgacgc

SEQ ID NO: 8315 - DNA, 80 bp, Glycine max
  Clone ID: 701101008H1
ctagaactcacaaaggacagaagaaacgcgaatgccaggagaactccaattaccacccgggttcagattccacacaacat

SEQ ID NO: 8316 - DNA, 273 bp, Glycine max
  Clone ID: 701101010H1
atcattccattcacattctcaacccaacacacaacttccaaccatattctctcgccacttcctcacatggacgcaaagagaaccctagagctcacggttttatcgttggaggagctccacgtggactggaagcacgccgcggagagcctctacgtggtggtacgggcagagtccatcaccagctactccacgggcacggccaccgaaagcggtggcaacccgtcgtggaacgagaagctggtagttgacgtgcccgtgcatgcgaggtccatc

SEQ ID NO: 8317 - DNA, 268 bp, Glycine max
  Clone ID: 701101011H1
gttggcctgggtctctctcagacgatcaagtgttggagaaaagcgcgttgtatcagagagccactatgggaaatttgaaggacgtgtgggtggtgggaaactcgggacaccctctgatggagggtgttttggttccttacactcatcagtactctacttggacgcagcacgcgtttaatcagaaggttggggcgattcagagcattgctaaggacgctttcgccaggctcaaagggaggtggtcttgcttgcagaagaggactgaagt

SEQ ID NO: 8318 - DNA, 268 bp, Glycine max
  Clone ID: 701101012H1
accaacccaatttcaccgttgctagctcttgtatcttcttttgtcggagaaaataataataacaatatataatgtcggttgaggagatgcagtcacagaagaggaatgtgtttgacgcagaaacggcgtcgtccttggtgaaggagctgagggacaacttcggttcgggaaggactcggagttatgaatggagagtgtcacaagtgaaggctctgttgaaggcggtggttgataacgaggaacagatcgtcgacgctcttcgttccga

SEQ ID NO: 8319 - DNA, 257 bp, Glycine max
  Clone ID: 701101013H1
catggatggggtaacagtagaagaggcacttaatggtcagagattattcatattagcctatcaagacgcattcatgccatatttgacaaggataaacgcactaccttctgcaaaggcttatgccacaaggacaatcctgctcttgaacgatgatgggactttgaagccacttgctatcgaattgagcaagccacatccacgtggagataatttgggcgccgagagcaaagtggtcttgcctgcagaccaccgtgttg

SEQ ID NO: 8320 - DNA, 218 bp, Glycine max
  Clone ID: 701101015H1
cggtgcggggtattctctcggacttgacttgtgacagcgacgggaagattgacaagttcatcaacggagagtccagcctgccgcttcatgagatggacggaggacgcacttactatctgggaatgtttttgggtggggcttacgaggaggcgctcggtggagtccacaacttgttcggcggacccagcgtggtccgggtgtcgcagagcgatggccct

SEQ ID NO: 8321 - DNA, 268 bp, Glycine max
  Clone ID: 701101016H1
gagctatcttttatacgcaaggctaaagaatctggagttgtttatcttcttggtcacggggatataagagcaagaaaagactcatggtttatcaagaagctaattataaactatttttatgcctttctgagaaagaactgccgaagtgggatcacaaatttaagtgtaccccattcacatatgatgcaggttggcatgacctacatggtttgaccatgaattttccaacccaaacaattgacaggtaatatggaattatagtttggta

SEQ ID NO: 8322 - DNA, 267 bp, Glycine max
  Clone ID: 701101017H1
ctcgagcgaatcggctcgagacctcaccaaaggaactaagaacttcattgaggctagagaaagtggtgatcaatatatcaaagaatccaaaagttttctttgatattctaattggaaagatgaaagctggacgagtagtgatggagttgtttgccgatgcaaccccaaaaacagctgaaaacttcagggctctctgcactggggaaaaggggattggacgatctgggcaacctttacactacaaaggttctgtatttcatcgtatta

SEQ ID NO: 8323 - DNA, 269 bp, Glycine max
  Clone ID: 701101018H1
atccgctcaaatgttttttctttccatcatcatcatcatcatcatcattcagaatcgctttccatgcttcccatagccttcaaccctcttggtctcttcttgttacttttcttctccctaacttcatatctttcttggcacatatcagacaaccacgccccaggactcaccaaaagtaagcttctttggatgattttggctctctttttgggtcgctgaggaagcttacaacccttcatggcgagaacgtctcgctctttctccttgct

SEQ ID NO: 8324 - DNA, 267 bp, Glycine max
  Clone ID: 701101023H1
caaaatggtttcagttgagagaataaagcagttctccagccttccctcagaagctccatggaaaattgctgacaaaactcctcctcagaattggcccagtcaaggcattattgagttaaccaatttgcaggttcggtatcgaccaaatactcctctggttctcaagggaatctctctcaccattgaagcaggagaaaagattggtgttgttggtcgtacaggaagtgggaaatcaaccctcattcaggtgttatttaggttgattga

SEQ ID NO: 8325 - DNA, 267 bp, Glycine max
  Clone ID: 701101025H1
cctcccccttcttcgctcccacccttcgttgacctcctattctcccctcatcggagctcaaatctccgatcccttcatccatatcgcttcaccgcaactttctcttcatccatcgcaagatctagttgaatctcaaccgcgctcctccgattcgaagctccactcactcactatctcttcagatctggggggtttgattgcgattctcactctgctgctcggatttgttcgtctgagatgtcgattttaccgaaaggcgattcggtt

SEQ ID NO: 8326 - DNA, 98 bp, Glycine max
  Clone ID: 701101026H1
atcccaccccacgctccctcaaaacaaaaagaagggtttcaaatttcaattcataactcaccaatcccatagcgtcgccgtttctacaccgtccgatt

SEQ ID NO: 8327 - DNA, 266 bp, Glycine max
  Clone ID: 701101028H1
ccaccacaacaacaacttcatcaagattccttcatcacctccaactgtgggagagtaagtaggaaaagggttttctttgagggcactgattctcccacacagaacaagttccaaaggattgtactccactgacaactactactaaactgttactaaagtcagttttatttatctatttttagttttttaatttatactatgatttaacaacggttcggacgcgtagcacggtggtgtttgattcgactgatctagtgtttaatgta

SEQ ID NO: 8328 - DNA, 255 bp, Glycine max
  Clone ID: 701101030H1
gcaaatgattgacatacttctgaatttgcagctgttagctcctttcttccttttcttcatctttccagtgtttttacttctctttctcacgtcctcatgtcctactaaacgaagcatcactatcccaaaaccatacccactgattggtcactacttagacctcaaaggcatcggcaaccgccgtatccagtggctatccgacatcgtcaaaatctcaccggctaccacgttcaccctccaccgccccttaggccg

SEQ ID NO: 8329 - DNA, 157 bp, Glycine max
  Clone ID: 701101031H1
attcaacaacagctcagcagtggtagtacccatgagcctgcagaatctgcactttttttgccttggcttctattctctcctcactttgaatcggaagatatcctttccattcaaggcagcaagcagaagtttcaacgaaagtctcctcttccacaca

SEQ ID NO: 8330 - DNA, 257 bp, Glycine max
  Clone ID: 701101032H1
attccaaacccagaaagaaacgctgcctagaagacacattttcgctattttccgcctttcagagtctctcgtctctctcgggtcatccatcgtacgctaatggccgccataatttcgcgaaggttcaggttatccaccttagcctcctcactcctaaaaccctcttcttattctataaccaatttcatctccaacaaccctaaacccccaatcttcaaaccctcccaatgtcttccacccatcaggtttctctcaac

SEQ ID NO: 8331 - DNA, 145 bp, Glycine max
  Clone ID: 701101033H1
aagagtccatgctctctgctgataaattatgctactgggtgcatatttgagtatgatgcagctcatccagagggttctggcattggctttaaggaggaagacagacccaacttctttagttctttctattccaaaactaacgcta

SEQ ID NO: 8332 - DNA, 255 bp, Glycine max
  Clone ID: 701101035H1
atcactagtagtgttggatgtatttctatttctaactaattattgtgcttattattattgttgagaaagaaaagaatggcaaagttaataaaattctttgagttgaacacaggggccaagattccttctgttgggttaggcacttggcaagctgaacctggtgttgtagccaaagctgtcaccaagcccttctggttggatacaggcatattgattgtgctcaagcgtataacaatcaagcagagattggttctg

SEQ ID NO: 8333 - DNA, 264 bp, Glycine max
  Clone ID: 701101036H1
ctctactactgctagctgtgacttgttttgagttcaatcaaatcgcattggtatctgaaatcaggaaagatggttagcgtagctgagatcaggcaggcacaaagggcagaaggcccagcaaccatccttgccattggaactgcaaacccaccaaaccgtgttgatcagagcacctatcctgattactacttcagaatcaccaacagtgaccacatgaccgagctcaaagagaaatttcagcgcatgtgtgacaagtctatgatc

SEQ ID NO: 8334 - DNA, 237 bp, Glycine max
  Clone ID: 701101037H1
ccacgatgcaaggtgttatcttcaccaccctgacgggatagcaaatctttcatgcaattgagaattgctgctgctaatagagaagcttccattaagatgggggacttcaccgggagtggtgaatatgtgactcacggtgaattaccttcctccaggccaaatcattcaaggaaagttacagttcttcctcttgtgtttctcatcttctatgcggcttcaggggggcctttcggggtg

SEQ ID NO: 8335 - DNA, 263 bp, Glycine max
  Clone ID: 701101038H1
tatgcctgcaatatatagcttggaggaataaattctctgttggcaatagagcattctgggcatcttcccctgattaaagataccccaacgatgattttggggatggatgtctctcacaattcacttggtcgattagatagtccatcaatagcagctgtaagactagtttggttttgtatttcttgtacctctatatttttggatttttggttatctctgcagcatatcgttctgttgcctaatgttggattgtaggttgttgg

SEQ ID NO: 8336 - DNA, 269 bp, Glycine max
  Clone ID: 701101039H1
gtattatcgtcggaagcggtatccatcaatgtttctttctgataaacttgcaccacacttcaattccacactctttactcatctccacacccaccaggtaccgtcacttcaaattttcagccacatttcacaatcttctctgcattttccttccaaatttatgatctgtttcgttttctgctatctgggtatgtctcaagtttgagttagagtgcttccctcgcttctccaagacaagggttggtaaacttttcatgccatggtatttc

SEQ ID NO: 8337 - DNA, 282 bp, Glycine max
  unsure at all n locations
  Clone ID: 701101040H1
ccctcgagccgagttcggctcgagcactaattccactcagccatcgagatcttcaagacatccaagagtcggcccaaccctccactcacgtcccgtaancacgtccccgatcgcacggccgttcgccgccgagaacttttccacgatcaacaccgaccgtcgctacttttccggcgactcgtcgatggcgttggaaccgttaaagacactcccgaacaccgtcagaacatgcacaatacgaggcagagaatattgctgctggtgaacgatagttccgctaag

SEQ ID NO: 8338 - DNA, 265 bp, Glycine max
  Clone ID: 701101041H1
ttatcaacagcacaaagcgggttactgtctgttcaagctaccatctctctctctctttcttagtgcctccttgccaggtgctgccactctctctttctctctcttcatccttctgttgggttggttgtggagtgttgttttctgttgtgcacgtgttgtcattttttaccctcgccacagatctgaagtgttcaagtttggattttgtgcttctggacgttaacatggcccaagaacatttcctattcacatctgaatcagtgaa

SEQ ID NO: 8339 - DNA, 260 bp, Glycine max
  Clone ID: 701101042H1
ctttctctaacacttcacaatctctgtttcagctttctctcttttctacaatggcttgcaccaccgtcgtgttgacgctagtcgccgcattgttggtaacctccgtcgtggctcagtctccggcgtcctcaccagctctgtctccaaagcgcacccccgtcgccacacctcagaagtctccctcgccggcgatttctccctccgccgtgtcgccgtcgtcctctcctcccgctccggtggtgcacactccgtctccgtca

SEQ ID NO: 8340 - DNA, 255 bp, Glycine max
  Clone ID: 701101043H1
gagagagctagacactgagcgaaattcgcaaaccctaatttcggaaagatcggcgatggctgcctccaaggatcgcgagaacttcgtctacatcgccaagctacgccgaacaggccgagcgatacgaagagatggtggaatcaatgaagaacgttgcgaatctcgacgttgaactgactgtggaggagcggaatttactttctgttgggtacaagaatgtgattggtgctcggagagcatcgtggaggatcctgt

SEQ ID NO: 8341 - DNA, 262 bp, Glycine max
  Clone ID: 701101044H1
ctcgagcgcgaagaaatagaacaaaaaaatgttgcagcttctgtacgcggtgatattcggggaaatgttcgtgatcgcaagcttcctcttcaaaactccggcgaggaagctggtcatcatcacattggatcgggtcaagcgcggtcgcggccccgtcgtcgtcaagaccgtcgccgccacgctgctggtggttctcgcttcctcgctctacagcatcgccaagatccggcgtcggacacctcgacgctcccgtcgttaaccc

SEQ ID NO: 8342 - DNA, 259 bp, Glycine max
  Clone ID: 701101046H1
ctcgcgcagcatcatcaccgccgacaacctccgcatcgcgcgaccgtcataccccgtctcctccacgacgcgcaccaccaccactcaccaaataccagaaccacggcgcacagccccactccggccagatccacgtgggacctcctcaacgcgcacaccccaccccggtccgatctgaccccaacgccactctcggctccagccccgcgactaccgcaaaaccacccttgcacctccgtcctctccgccgcgcgtcctc

SEQ ID NO: 8343 - DNA, 264 bp, Glycine max
  Clone ID: 701101047H1
gaaatttattacatgttgaaggctcggggagcgaaagtgccgaaaaccaggaagactccaatgactgttgcaaatcctcgtgaagttccggaatatgaactcaacccgttagagctacaggttcggaagagtgatggtatttcaaagggaacataccaagtagctaaatggaatggcaccaaggttgcagtgaagatacttgataaggacagttattcagatcctgataccataaatgctttcaaacatgaactcacattatta

SEQ ID NO: 8344 - DNA, 257 bp, Glycine max
  Clone ID: 701101048H1
ctcgagcggtttgcttaagatgagaaaaagcaaccacttgatcggtctcttaaacttcctaacattcctgctgtcgattccgatcctaggaggcgggatatggctgagcagcagggcgaacaacaccgactgcctcaagttcctgcagtggccgctcatcatcatcggcgtcagatcatggtcgtgtccctggcggggttcgccggcgcgtgttaccgcaacaccttcctcatgcggctctacctcgtcgtcatgtt

SEQ ID NO: 8345 - DNA, 263 bp, Glycine max
  Clone ID: 701101053H1
cacatagcactcagcaataagacggtccctattgtgcctttacttcacggtggcggcttttgcttcggttcgcgcacctggccccatattcacaactgttgcatgcgcctcgcgtcggggctccaagcggcggtggtttcgccggactaccgtctcgcgccggagcaccgtcttcctgctgcggtggacgacgccgtggaggcggtgaggtggctccagaggcacggcctgagcttgagggaggccgcgtggttgagtggggg

SEQ ID NO: 8346 - DNA, 249 bp, Glycine max
  Clone ID: 701101054H1
gcgaagggaaagggttaggcatcattcatacactgaacgaacgctcagctcagtcaggtgccggcgctcctctttcacgttctcatggaaaacgacgacgtcgacatgcacgcgcgccgacaccagcgaagaaccggatgacatgaagaagcgcttgaaggagcatggaagatgaagctgctgctttgcgagagatgcaggccaaggtcgagaaggaaatgggatctgcgcaagatcctgcaaatgctt

SEQ ID NO: 8347 - DNA, 265 bp, Glycine max
  Clone ID: 701101055H1
ggaggatgctgaagagaagaaagaaaagaagaaaaaggaaaagaaagacaaggatgacaaaactgatgtagagaaggtcaaggggaaagaagacaaagagaagaagaaaaaggaaaagaaagtcaaggatgacaaaactgatgctgagaaggtcaaggggaaagaagatgatggggaggacaatgaagagaaggaggaaaagacaaaaaagaaaaagaaggaaaaggatgacaaaattgatgtagagaaggtcaaggggaaagaa

SEQ ID NO: 8348 - DNA, 264 bp, Glycine max
  Clone ID: 701101057H1
actcggaatctttcactccaccgctctaacccctaattccgatcaacgcttttgccttcgtcgctcgccagtttgttagcgggagctcagttattctgttttattgacgaagtgataacaaatggatgattgggaggatgagcatattgcccctattgatcttacattgaaagatccagttaaaagtaattgggatgatgacgatgtggatgccaatgatgtgcaggaatcatgggaggatgcagacgagcctgctccggcacc

SEQ ID NO: 8349 - DNA, 247 bp, Glycine max
  Clone ID: 701101058H1
ctcagctttgctgagtactaggctcagcaaggacttgcagtcaccagatcagcagccaaatacggtggatataaactcggcaatttataatgttggaccacctgtgccaacaagagttccaaaaatgcttagttttgtggacacaccggccatggttaggggtcctgaggacctaccagggtattgggtggtgactggggcacactgtgtgtcgagggtggtagaatctcaatcacggcaaagtctt

SEQ ID NO: 8350 - DNA, 253 bp, Glycine max
  Clone ID: 701101059H1
tatcaaagagagagagagagagatgactgagttgcaaaggttcgtaacatcattcagaagacaagggtcttcgggattggtgtgggatgacaaattcatcgctgggattgagaatgaaaacaaacaagagagtggtgatggatcaagagccacgttgcagcgaccttatcggacggtcaacgttgcaccacaagccatggaccctccttctcccaagctagcaacttgtggcttctgtgctctctttcggaaa

SEQ ID NO: 8351 - DNA, 259 bp, Glycine max
  Clone ID: 701101061H1
cgagggcaaggagtaccctggaagcctcactctatttgtgacggtaacatgtatagttgcagccatgggtggtttactcttcggttacgatatcggaatttcaggtggagtgacgtccatggatccgtttctgctcaagttttttccgtcagtagttcggaagacaaactccgacaaaacggtgaaccagtactgccaatacgacagacagacactgccgatgttcacgtcgtccttgtaccggccgctttgctgtcgt

SEQ ID NO: 8352 - DNA, 252 bp, Glycine max
  Clone ID: 701101063H1
tgcggtcatcgataccaccaagtatgggcaggttcatgcccgggtacgcaaagcacgtgttgggcccaatgctgaagtttctgagggagacgagaacacccttgatggtgaacccgtacccgtacttcggttacaacgggaaaaacgtgaactttcttctgttcaggcccaaccgaggcttgtacgacaggtccccgaagaggagttacacgaaccagttcgacgctctaatggacgcggtgcactcggcga

SEQ ID NO: 8353 - DNA, 263 bp, Glycine max
  Clone ID: 701101065H1
gaaaaagttagggtttgtaactttgtcttttgcttgcgaatctgaatcgaataataatcaatcaatcatcatgtcgtcggcgaagaacatcacactgaagagttcggacggcgaggctttcgaggtggacgaggcggtggcgctggactaccagacgataaagcacatgatcgaggacgactgcgccgacagcggcatccctctgccgaacgtgacgagcaagatcctggcgaaggtgatcgagtactgcaagaagcacgtcg

SEQ ID NO: 8354 - DNA, 240 bp, Glycine max
  Clone ID: 701101066H1
attcggaaggattcccttgtttgtgttggtgttaaaaggcagaattactgtgaaagtagtagctgttttgatgctgggcggacatctgttgtaccttcagaagattcattcacatcaaaacttgaccataattctaacaaaaccccatgtccaaagggtgcatcagattataccttgggtaaaggtgtcacaggtttctcattggatgcgtctgatctaaccaagcttctcacaatggac

SEQ ID NO: 8355 - DNA, 257 bp, Glycine max
  Clone ID: 701101067H1
ctggtcccacacatgctggaggctgaagcaggcgagtagagcctgaaagaacactgactgatgcacagagggatgaatttgaggatatgctgcgtgctttaacattagagaggagccagataaaagaggctatgggattttctttagataatgccgatgctgctggcgaggtagttgaagttttgactgaatccttgacacttaaagaaacccctattccaactaaaattgcacggcttatgcttgtctctgatatt

SEQ ID NO: 8356 - DNA, 262 bp, Glycine max
  Clone ID: 701101069H1
ggttatgtcaaacgaagaagcagtggaatctattcgacaaataaaggatgctcaagctgcagcaaagcaattgattgaagaggcagtttgcaagaaaagtaaggatgacatatcttgcatagttgtgaggttccaatgacatgtttttggttaagcacaggaatcctttccgaaacccaagaatgaaggccctgctggacatttagctagcactgattgcatgtataaatgattcaataataacttttgctttttcacgaga

SEQ ID NO: 8357 - DNA, 262 bp, Glycine max
  Clone ID: 701101070H1
atccattcactaatcactaccaattgctaaagatatttcactcactgtccacactactaatacagttttctggagatggcttcaactgtctcttacatgcttctacttcccgctctagtgatggttgcctctgctggggacttaaacaaagactttgacatcacatggggagatggccgctccaagatactaaaccatggagagttactcactctttcattggacaaagcatctggctcaggttttcaatcaaagaatgagt

SEQ ID NO: 8358 - DNA, 262 bp, Glycine max
  Clone ID: 701101071H1
cggctcgagtgttgcaccaacttgggctggtccactccctatcgtgtttggtcgagactctagcatggaaacaagatatggtcttctaagaggcacattaaaggcccctgcagttggctggatgatgtataacatgcttgttagcaacgagaatgctatccaatcacagtacaaatcccatgtatatgccaaccctgacaatgtgactccaggaattgtggaaagcagatatgcattgaccaaacgaaaaggagcacgttac

SEQ ID NO: 8359 - DNA, 262 bp, Glycine max
  Clone ID: 701101072H1
gcatgacaaagccatgctcattggggctgatcccacgcatgttggagataggtgcctgagggtgaccatacaccattcgttttttcaatgggactcgacagaggcaacctcgtgttaggtttgcaaaagtgcatctgtacaataactatatcagaaactggggcatatatgctgtttgtgctagtgtggaatcccagatattctcgcaacataatatctatcaagccggccagaagaacagtggcctttaagtaccttactg

SEQ ID NO: 8360 - DNA, 262 bp, Glycine max
  Clone ID: 701101073H1
cagcactcaaatcctctgagagaaaaaaaaattagggttttgcatttcgggtcagacagactcagacatgggaggaggcaatgcccagaagtcaaagatggctcgcgagaagaacctcgagaagcagagggctgccgctaagggaagccagttggattcaaacaagaaagccatgtctattcagtgcaaggtgtgcatgcaaacatttatatgcaccacatcagaagtgcagtgcaaggagcatgctgaagccaaacacccc

SEQ ID NO: 8361 - DNA, 259 bp, Glycine max
  Clone ID: 701101074H1
cgctcgagccgaatcggctcgagcgagctcgagctctcacgagaagagtactactaactgtgacgtaatacctcagtggagcacaagatgaactcatggaacatgagaacttccaagttactctctcaacaacttgcttatcctccttatcgcttggtagacgagattccaaccatgggaaattccagttgtgtgagcaaagagccacgaggttcacagatgacaatcttttatggtggccagttcttgtcttggatga

SEQ ID NO: 8362 - DNA, 257 bp, Glycine max
  Clone ID: 701101075H1
cactgaagcccttgctgctgtttccgactctagtgacagctcgaaagacaaatcagatcagaagactctccgcaggcttgctcagaaccgtgaagctgccagacaaagccgcttgcgaaagacagcgtatgtccaacagttggaaagtagtcgtttgaagctgacccaactagagcaagagcttcagcgagctaggcagcatgggattttcatatctagctcgggtgatcaagcacatacattgagtggaaatgggg

SEQ ID NO: 8363 - DNA, 257 bp, Glycine max
  Clone ID: 701101077H1
gagtttcttacggacgacgacgtatccattgagctctcgacggtggctctcgatccgccaccgtccgatctcctcctccgtaactgacgacggtgtttcgatatcttacatctctctctagccacagttcttcctggtctaaaggagtagtggagagctctggaagtcaacaattggcataaggagcttacatatgatgagtgggtaccgatcactgtatctggtgcacgtccagctgctcgctacaagcatgctac

SEQ ID NO: 8364 - DNA, 259 bp, Glycine max
  Clone ID: 701101078H1
ctctgctaaggcgtgttcaacaatcggcggcgaaaatgccttcccacaagaccttcaggatcaagaagaaactcgccaagaagatgaggcagaacaggcccatcccttactggatccgcatgagaaccgacaataccatcaggtacaatgctaagcgcaggcactggcgccgcaccaagcttggattttaaggtcgatgccaacctccgactcgagatttttgttttggttttggttttctagaatgtcacgagcgatg

SEQ ID NO: 8365 - DNA, 260 bp, Glycine max
  Clone ID: 701101079H1
cttttactcacaatttccattgcatcaaaacggtaacattgcacaaccaaaaaataaattgtgagtaaaaggagaaaaggaaattttatcagaattttgtaccaattgattgcattttgagagggtgaaaaaggtctctgcaatgtattctttaacgaaattccaaaattgtttcctttgatcctcccaagcaaaccgacattgaccttggggaggagttcaagttcaactcagttgcgcaggtcacattgaccggtttg

SEQ ID NO: 8366 - DNA, 250 bp, Glycine max
  Clone ID: 701101080H1
gttggacgagagcctcctcattcattggtctgggattcagcaaaggaggacttcgtggcaagatgacgttcttggcacaaactgtcctattcctgcaaagtggaactggacttaccagtttcaggtgaaggatcaaattggacgctttttctacttcccttcccttcatcttcagagcgctgctggtggatttaggggtttcatcataaacaacagacccatcattccgattccttttgatacccccatg

SEQ ID NO: 8367 - DNA, 164 bp, Glycine max
  Clone ID: 701101082H1
gcgttccttcataaactacgttaaccatccctattcttcattactctcatgttcttcgtgactcacacatcagtttgaatcccgcattctataatcttctttcattgaaaccgctaaactaaaagtatttttttctcttcttttaaaaccttccacacaacata

SEQ ID NO: 8368 - DNA, 258 bp, Glycine max
  Clone ID: 701101084H1
ttatggtggatacctaggcacccagagacgaggtgtgggcagctcgttacatcttggagaggatcactgagattgctggtgtggtggtttcctttgatcccaagccaattcagggtgattggactggtgctggtgctcacacaaactacagcactaagtccatgagaaatgatggtggctatgaagtgatcaaaaccgccattgagaagttggggaagagacacaaggagcacattgctgcttatggagaaggcaacg

SEQ ID NO: 8369 - DNA, 252 bp, Glycine max
  Clone ID: 701101086H1
ttacactatgtctcttccaattcctagcaggttcgtattcaacgacattcacgattgtgaacaagtgcagctacacagtttggcccggcattttatccggcgccggaacctcgccgctccccaccaccggcttcgtattacaaccaggcgagtccaacgtgatcgccgtgccggccgcctggtccggccgcctctgggggcggaccttctgcacccaagatgccacaggaaaattctcctgcgtcaccggcg

SEQ ID NO: 8370 - DNA, 266 bp, Glycine max
  Clone ID: 701101088H1
cagaaacgttcactctccaaaaaggagagtgaacccttcaagatataacacacacaaaaagaaccagctaatagggaactgcatcgacactatggcactagatgacatatatacacaagatgggaccattaccatctccaaaaaacctgccaacaagacaaagactcggaaattggaaagcttgctattttattcttggaaatgaatgttctgagagattggcatactatggtatgagtacaaacctggtgaactatcttcgggag

SEQ ID NO: 8371 - DNA, 257 bp, Glycine max
  Clone ID: 701101089H1
cttaaggcgaagaagaacaatggttctaaacaaatttgtgggaacataattctgagttcaaaagaagtggtgtgcaatgctgaaagttgtcacagtgcagatgagaaacaaatttcagacaatagtgagctgaagaaaactaatgatgcgccacctaaagggaagagtgaggaggctgaaaataaaatgaaagacagccaaaatatgagcactggtgacaaaagtcctaatgaagagtcagacggtaaccagctgaa

SEQ ID NO: 8372 - DNA, 253 bp, Glycine max
  Clone ID: 701101090H1
atcatgagttgttgaagaatattgatgatggtgatgatgattatgttggtgaggtgatggagccagaggttgccatgagatctgttagctccttgaaggctagggatgcaattgcgcataaccttttgcaccatggactagctggaacttcttttgtttgattggaattgaaaactgaagattaagataatgtataattaattcttttgcttgtttttagttctagacatatgatgatggtatttaatcaagg

SEQ ID NO: 8373 - DNA, 259 bp, Glycine max
  Clone ID: 701101091H1
gtttctcgtggcagtgcaaaggcaagagacggccaccgtagaagacgcgcaagccatcatcgacagcttcaggcatttccctcgcagaggcgctggcctcaatctcgaaactttcttcaagtacctcttcagtgacgataacccccctcttcttccttctcatggggtgcatcatgatatgactttacccttgtcacattatttcatatatacaggccataattcctatttaactgggaatcagctgagcagcgactgc

SEQ ID NO: 8374 - DNA, 248 bp, Glycine max
  Clone ID: 701101092H1
ctcgagccgcttttcaaatattgcatattgcttgtggctaatcacacacttttccatgaactttgctgcttttgattttgatcacaacaacacaacgccaacgccgttctctgcttttgaacatcagatattatgaagtcaccttctcgagctttttctggtgctgatacaacgagtagaaaatcatgtctttatgccatcttcccagcagcttctttaatttgtgctgttttatttttcatgacctc

SEQ ID NO: 8375 - DNA, 250 bp, Glycine max
  Clone ID: 701101093H1
caaccctttcaagccggcctaaaccccattacccaaaatctgtttttttttttttattttttttcctgcaacactctttattggatcatcttgtatttcattccccctttacaatttcctttcaaaaaaaattttaaaaaatattaaaaagggctcttttttgtgaattttgacccatttggccaccgacagatttcgatcttctccgtgccaaagttgtaatcttttcgacttttggcgaggtgggccg

SEQ ID NO: 8376 - DNA, 256 bp, Glycine max
  Clone ID: 701101094H1
catctccttctcaaactagtagtattattcttccattcataatgggtgttttcacattcgaggatgaaatcaactcccctgtggctcctgctactctttacaaggccctagttacagatgccgacaacgtcatcccaaaggctcttgattccttcaagagtgttgaaaacgttgagggaaatggtggcccaggaaccatcaagaagatcactttccttgaggatggagaaaccaagtttgtgctgcacaaaataga

SEQ ID NO: 8377 - DNA, 160 bp, Glycine max
  Clone ID: 701101101H1
atttgtcttcaaaaggagcgacatgggatgagattgactttgaattcttgggcaatttgagcggcgacccatacatccttcacaccaacgtgtttagccaaggcaagggaaatagggagcaacaattctacctctggtttgacccaactgcagattttca

SEQ ID NO: 8378 - DNA, 77 bp, Glycine max
  Clone ID: 701101105H1
agcagccacacctcccgcagcagccatggatctcaaaactgatctatgacgaatcagtggagccaagatctacccag

SEQ ID NO: 8379 - DNA, 156 bp, Glycine max
  Clone ID: 701101108H1
cctaaacgccgtcgacgccgtggctggaagaatatggcttcatttgtttctacccactgtatccttcctagcggggttggatttgtccatgaccaagatcgttcttgtggtagaactaacactttgcatcttcaaaatgctcctaaaagccctagc

SEQ ID NO: 8380 - DNA, 156 bp, Glycine max
  Clone ID: 701101109H1
tgcatttcacgctttggctgaaggacttgcattgggagtggctgcaccaaaagcatacggacttggtcgtcatatggtccttccagtctctctacacgggcttccccgaggtgcagccgtggatagctgcatatttggagccactgatagctggct

SEQ ID NO: 8381 - DNA, 155 bp, Glycine max
  Clone ID: 701101111H1
aaaaatccatttggaaaaaggaaagataatcttcctgatgctgttcctagtgcaaatggagctccaccaacaatgacttatcagtagcttgaaggggatgtactctgttctttatgctccgacaaatattactacataataggatgcatcttgct

SEQ ID NO: 8382 - DNA, 59 bp, Glycine max
  Clone ID: 701101112H1
ctgtttctctatgtagaatttcaagctctatctctcgctcgcatatctcggaaaatttt

SEQ ID NO: 8383 - DNA, 155 bp, Glycine max
  Clone ID: 701101114H1
acagctttcttctattgagagacagatggaagttccctatgtttgcagtgtgatatgattgatcatgttggaggaaaagaaagcatggaagatctcttctgatcaggcaaagagttgagtttccaggagatcaatctcgtcatgatgaaaatccg

SEQ ID NO: 8384 - DNA, 157 bp, Glycine max
  Clone ID: 701101115H1
tgtgacccatgcaactgcaagtaaggtcaagatgtataaccttgaagcagagatagctgtcatatatgtatcaacaaataataagaagtagaagttgcgtttggagctttagaataaagtgtatgctatgtgttttgttggtcttttataaatatgt

SEQ ID NO: 8385 - DNA, 141 bp, Glycine max
  Clone ID: 701101117H1
acataacacaaaactacaaaacagaccacttccgatcatgaccatgatcatgatcatgttaacattcccgtcattgacctgaaacatgttctctcggaggatccgatcctccgagaaacagtgtttgggcaggtggaccag

SEQ ID NO: 8386 - DNA, 143 bp, Glycine max
  Clone ID: 701101119H1
agctcgagccgtgaagaccgacgtgtgcgccatcatcgacgatctgctcgacacctttgacggcccactcgacgaagagatcgaggattagccagccagatatcgcgaaacgatgaagcaagatgcgttggcacgattgaagc

SEQ ID NO: 8387 - DNA, 153 bp, Glycine max
  Clone ID: 701101120H1
ctagtcctgattcctagctctataaaaggagaataccataggcatctctcacagacaaacaaaccatttaccagctatccttgttccttttgaaggttagaagtgctacaataaaaaccatggcagctaatcaggaagatgtgaagcttttgg

SEQ ID NO: 8388 - DNA, 157 bp, Glycine max
  Clone ID: 701101123H1
cctcgagccgattcggatcgagcaacttctaacacatacactactccctctctctctcttatcgtatggccgccaattccaacagccgagggatcaccgccttagggaagcgagtcgccaaccggatctggacttccaacgcacctcctctcacttc

SEQ ID NO: 8389 - DNA, 157 bp, Glycine max
  Clone ID: 701101125H1
tgtttccactagcattatttgcccattaacaatcaattttcagctctcattttcatttctttgcaattcctccacacacaccatacaattcgagtctttgatattttaatcacagagagagaagagggtttgtttatgggttttggaaatttcagcc

SEQ ID NO: 8390 - DNA, 158 bp, Glycine max
  Clone ID: 701101126H1
agcgatgaaggaggaagaagtagtggagatacaagttcagtctcatagatggatacgacatcggaccaatacgttactccccagactcagccatcgaactgctcgaggaccgcatttttgaagactggaccaaagacaagaagattatacaaaaagca

SEQ ID NO: 8391 - DNA, 154 bp, Glycine max
  Clone ID: 701101127H1
gttaatttgttgagagagagcaatcaagaacattcatggagtcttcacaggagagagcagacaacaccaattaaccaccacctgataggctgatacaatacagtctcctatcctttttcgacaaccagactggctgcgaaatctagttcgagtt

SEQ ID NO: 8392 - DNA, 153 bp, Glycine max
  Clone ID: 701101128H1
aggacgaagagcaccatttcgagtccaaggcagacgccggtgcctccaaaacctaccctcagcaagccggtaccattcgcaagaacggatacatcgtcatcaaaggacgcccctgcaaggttgtggaagtttcgacttccaaaactggaaagc

SEQ ID NO: 8393 - DNA, 159 bp, Glycine max
  Clone ID: 701101130H1
actcgagccgaatcggctcgagaggagtttcaaccattgaactttgatatatattatgacccacagaagcgagctactggataccaaattattctcccctgtacttgcacatattcaaccagaatttcattatcaagcaaacatcgaatcagatggtcg

SEQ ID NO: 8394 - DNA, 156 bp, Glycine max
  Clone ID: 701101131H1
cttgaaggatcaaatgagccctgcttattctgctagaaagcaatcattggatcatgaaggcaaacttcacatgcctcatccatggcctgtaatgccctctagtctgtcactgagcatcttggactctaatacaacaggtcctgcacatggtggtga

SEQ ID NO: 8395 - DNA, 157 bp, Glycine max
  Clone ID: 701101132H1
gcagaagcttgtgtgtattatacccaataactacaccaccattgtcaatctctatttcgattaaaaaggttgtggccaatggagcggtattgtgttttcatgttaagaacgatatgttacacaggaagtcacggtcagagtttgtaatggagaaagt

SEQ ID NO: 8396 - DNA, 160 bp, Glycine max
  Clone ID: 701101133H1
cgaaccgattcaagaagaaccgcaagacgcgcggccacgtgagcgacggtcatggccgtatcggaaagcaccgtaagccccccggcggccggggaaacgccggtggcatgcatcaccacaggatcctgttcgacaagtaccatccgggcttcttcggtaa

SEQ ID NO: 8397 - DNA, 158 bp, Glycine max
  Clone ID: 701101134H1
atctagcatgagaactccagggccatcttcagtcaccaaggatgctagattatctcaacagggttcccatgcacaagggtgggctggacaaccatctcaacaaccaaatggatctcgcgggccagttgcctgggcaaaccctgtaaagaggctaaaaa

SEQ ID NO: 8398 - DNA, 157 bp, Glycine max
  Clone ID: 701101135H1
gtttcaggatcaaattcgtctgaatatggtgttccaggggggtttgaacacattaagaagaatttatctggagataatgtattggacttgttcacatatcatagaatgggagcatcattcatctctccagagcattttccttagttcactgagtttg

SEQ ID NO: 8399 - DNA, 156 bp, Glycine max
  Clone ID: 701101137H1
ggccattgctggtcttagtagccaaaaccctggagttattaccattgcaaatgctgtgtttggatctaaacctcctatctctgatgaagttcttgccaaagcttttcaagtgggcaaaaacgtaatcgactaccttcagaagcaattctggtacaa

SEQ ID NO: 8400 - DNA, 156 bp, Glycine max
  Clone ID: 701101138H1
tgttactttccaatttgaattgttccattttcatttctttagcaaaagttgcaactacttcctcagaaaaaaagtttctaagttaaggaaatccagacacaacaaaatacgcggtgacggtgcagctacatgcatagacatcctccttgctatcat

SEQ ID NO: 8401 - DNA, 113 bp, Glycine max
  Clone ID: 701101139H1
tgtgtaatgcaggaagcgactccgcgcttcagcctctcaaacgcaacttcattatccaattgccttcgcaaaatgtcggggaagcgaaagaggaagctgaaattgttaagcga

SEQ ID NO: 8402 - DNA, 155 bp, Glycine max
  Clone ID: 701101140H1
agagatttcaacaagttcaagcccatgcacatgtatgacatagtggtgaagaacaagaacgcttttgaagttagggacatgtagggtagggtagggaagagacaagacaacatacatatagggaccaaacaaacaaccccttgcaaggccttcgg

SEQ ID NO: 8403 - DNA, 128 bp, Glycine max
  Clone ID: 701101141H1
tcggaacgcgccgctcgaggtctcactggtgaccggttccacattgctacatgtggtgggtggggtgcatcatggcggaggtgactattcagggaaggaccctaccggggttgacagtcgtggtgcct

SEQ ID NO: 8404 - DNA, 131 bp, Glycine max
  Clone ID: 701101142H1
cttcacaatcgcaaatcttctatgccaaatcgtagatctacggaaaaatacgttatacatcggagcttacatgtcaaatacgaggattcccagatctgaatatacatctttcggcacacccgagtatgtcc

SEQ ID NO: 8405 - DNA, 155 bp, Glycine max
  Clone ID: 701101143H1
ggtgaacacagagtttgagcgtgttcttaagtatattgatgaggatggggatggtaagatttctccatgtgagcttaggaaccggctaggcatgattggtggtgagttgttgaccaaagatgctgaaaagttgattgaggagttggattctgatg

SEQ ID NO: 8406 - DNA, 152 bp, Glycine max
  Clone ID: 701101144H1
ggctgctggtggttccattcccacacaatagagtagacgagtgataaaaactcgtgaagcttctgatcggagctgctgatttcgccctctgtttatctttccctggattactcgttgagaattacgtccaaggtctgaacgatggattatgg

SEQ ID NO: 8407 - DNA, 150 bp, Glycine max
  Clone ID: 701101145H1
cttctctctttaccttcttaacgcaccaagcgaaggacaaagcgctttctaacttaagtgatggcgaacgcagctgaagtttcagccttgaaccgcatcaaactgcatcttttgggtgaactctctccactggccactcccctaaactat

SEQ ID NO: 8408 - DNA, 152 bp, Glycine max
  Clone ID: 701101146H1
tacgagcgcctatagtccttgccagtcatcccaccagctcgccaaggccaagcatatcgagccactcaaggcatgcaatataatcgaaggggatgccgaggatctcccctttcgaactgattatgtcgatagatatgtatccgcaggaagta

SEQ ID NO: 8409 - DNA, 158 bp, Glycine max
  Clone ID: 701101147H1
gtgcgttgaagtctgctaggttcgtgagcaggttcgaggaaccttaccaaagcgaggaagagatgaaggagaggtacgagatattctcgcagaatctcaggttcatccgctcccacaacaagaagcgtttgccctatactctctctgttaatcatttt

SEQ ID NO: 8410 - DNA, 150 bp, Glycine max
  Clone ID: 701101148H1
ccatgatgttgttcttggaagacggaacactaggactcacaatggtcatcagttgaggctatgattcatcaacggatatgcactttgcaagagtattaacccatatgaagctgctgcttatggtgctgcagtgcaggctgcgattctcag

SEQ ID NO: 8411 - DNA, 155 bp, Glycine max
  Clone ID: 701101149H1
ctctcaccttctacattactctctcttctcctacacatttctaaaggttccattgcatcatctgactcactcctcagtagctctgagactgaaccctatccccatacaaaccttatccctcccccaaatgcccagcctcagatcaaccagattcc

SEQ ID NO: 8412 - DNA, 69 bp, Glycine max
  Clone ID: 701101151H1
gggaagtcggtcagatgattcgtcttcagagtctgaagatgagaagactgatgcaagagatgtcgtacc

SEQ ID NO: 8413 - DNA, 155 bp, Glycine max
  Clone ID: 701101152H1
cctcgagccgaatcggctcgagagcaattgtcagctggatattgttcgagtgtttagggaatcaaaatgtctcaattgtaaccgaaaaagaggttcggacactatccagtactaatgcatctgaactgttggaagctgtggttaaaactgtgaat

SEQ ID NO: 8414 - DNA, 136 bp, Glycine max
  Clone ID: 701101154H1
cgttgttgttgttctaaaacgtccacacattctccgtcgccacaacaacaatggctccgaagaaaggtgtgaaaggttccgttgtagcagcgaagaagaaggttcaggagaaggtgacgaatcctttgttcgagaa

SEQ ID NO: 8415 - DNA, 154 bp, Glycine max
  Clone ID: 701101156H1
gcagaatcatttaagagtagctctaagaagaagaaaaaaaatatgaaggttgtgtacttccttgttgccatcttggctttgacatcctctcttgtctctgcctctgaccctagtcctcttcaagattttggtgtggcagccaaagaaaaagatg

SEQ ID NO: 8416 - DNA, 152 bp, Glycine max
  Clone ID: 701101159H1
atgagcttgaagaactgggtagatttctgatcagagactgatttgtttggatggcaagtgcttgtggttgaagtcgaccattggaaataagttggtcagcaggagtgatcttgattggattgacagcagaattcaagtttgctttagtgctg

SEQ ID NO: 8417 - DNA, 151 bp, Glycine max
  Clone ID: 701101161H1
aagagctcaagtgaaatcattggaagaacttgtcagcaaacttcaggctgatttggttggtggtgctaacaaaaatatgttaggtctagtcattgaagcagaacctgaacttgcaccgaaaaacgtggaaaatgaggagataaaccagctc

SEQ ID NO: 8418 - DNA, 131 bp, Glycine max
  Clone ID: 701101162H1
attatggcgtagagcgacgagcgacacgggtaaacacgcttaactcattcagcaatgcacgaggatccactaagtggtgaagatgaaaaggatcctaagcacaaccacacagagggagcaccacaaacaac

SEQ ID NO: 8419 - DNA, 155 bp, Glycine max
  Clone ID: 701101163H1
ttcgttcttcgcccgacacatttttcttctccgatctcctattcctcctcctatttttgttactcgaagcgagattgatagatagatcgatcctctctatgggttaaagttaaatctgaatccgaatatgatctaatcattttcattttaggtct

SEQ ID NO: 8420 - DNA, 156 bp, Glycine max
  Clone ID: 701101164H1
gtttgtatgacctcgccaacattgtgcccacattggccaagttttatcatcaggccagtgaagcctatgaacaagcttgtacacgccatattagcatgattatctactatcaatttgaacgccttttccagtttacccgaaggattgaggacttga

SEQ ID NO: 8421 - DNA, 152 bp, Glycine max
  Clone ID: 701101165H1
gacaacttctgagcatgcttgttaagctcacgaattcaaagaacgccttggaaattggtgtattcactggttactctctgctctccactgccctggctcttccccctgatggaaagatcttggctttggatgtgaatcgcgaatactatgag

SEQ ID NO: 8422 - DNA, 147 bp, Glycine max
  Clone ID: 701101166H1
gttttctcaatttccgcttattttcgttccagccagagccagcttttccattttcccctttaaattttctccgaatccaaacggaaccgtaatcggttcctaatccctttttggttggtatgttccttctctcttcccggcaaggtc

SEQ ID NO: 8423 - DNA, 153 bp, Glycine max
  Clone ID: 701101167H1
taaacactaccctgctgcaccaaagtgccaagtcacacgcacaaccattttcttttctttctctctcactctccaacttgcacccaacccaataatgacaataacaaactcaacctcgccaggatccaacacaacgcactccttacacagacc

SEQ ID NO: 8424 - DNA, 151 bp, Glycine max
  Clone ID: 701101168H1
ctcgagccgtgagatcaaggttccctggtgggatgtttggtgatgacatgtttgcatcttttcgggaagggggaggagtacatatgagtcaaggtgcatctcggaaagctcctcccattgagagtaaattgccctgcactcttgaggagat

SEQ ID NO: 8425 - DNA, 150 bp, Glycine max
  Clone ID: 701101169H1
ctgagaagggctgaagaaaatagagggcttttggctgcatcaggtcctgataggcaattgatgagaaaggagttgggaagaagattaaaagctgcaatgttctaaatttgtcagaaatcaggattcattgactttttgtacaaattagag

SEQ ID NO: 8426 - DNA, 149 bp, Glycine max
  Clone ID: 701101170H1
gtcctaaagaccgtgagggtgtgaaggaggaagtgattgttgatcttgttgaccagtgccgttcataccaaaagcgtgtcatgcttcttgtgaacaatactacggatgagcaacttttaggtcagggattggcactgaatgacagcctt

SEQ ID NO: 8427 - DNA, 151 bp, Glycine max
  Clone ID: 701101172H1
gtcgcggacacagaacagagcttgcagaagcgatttctcatttctcattcttaacaacacacttcaacaatggccaaaaccttcaaatacatcatcctcggaggaggagtttccgctggttatgcggcgagggagtttgccaaacagggcg

SEQ ID NO: 8428 - DNA, 153 bp, Glycine max
  Clone ID: 701101181H1
attacctatatgtcagataatcctagaaactcagcaaactaggcgtcgcttgagctttttaagaagatcaaagtatgttcttgtggctgcttcatccacatacagtagaaagttgtttttcctcaactgtaccaatggtcaactatatgtcgg

SEQ ID NO: 8429 - DNA, 151 bp, Glycine max
  Clone ID: 701101183H1
ttctttttctctaagtctaaggggtgccctgagatcactttgagcaatggtgaaggctgtggcagttcttggcagcagcgagggtgtcactggaactattttcttcactcaggagggaaatggtccaaccaccgtaactggatctcttgct

SEQ ID NO: 8430 - DNA, 151 bp, Glycine max
  Clone ID: 701101184H1
attaaatccactttgaacctgtaccatgtctctcgttaaacaaggcatttcaattatcgtgtcttcttggctctctgtttagggttgagtatgaagttgaatattgcagcactggccaaaagaatggtaatggctgtcttgatgggaagag

SEQ ID NO: 8431 - DNA, 150 bp, Glycine max
  Clone ID: 701101185H1
cgatgatggtatggtgttggatgaaggggaagatggatttcctgttcaagaggaaaataaatattcagaatttgatggtgatggagcttctcttagattgggagattctgacgaagaaactgacaatgattcagtgatgatggaagtaga

SEQ ID NO: 8432 - DNA, 150 bp, Glycine max
  Clone ID: 701101186H1
tattactgctaatggctctgttgactatgattttatgcgaatagaccttttctttgtgattttatgcaaaaaaaaaaaaaaaaaaaaaaaaaaaaaaaaaaaaaagaggggggcccccccacaggtgcccccccccccccgggaattttt

SEQ ID NO: 8433 - DNA, 150 bp, Glycine max
  Clone ID: 701101188H1
ggacgatgcggccgtggtgtctctagattcgctgccgttagggttccgattccgacctaccgacgaggaactcgtcaattactacctgcgacagaagatcaacggtaatggtcgcgaggtttgggttatccgagaaattgatgtctgcaa

SEQ ID NO: 8434 - DNA, 148 bp, Glycine max
  Clone ID: 701101189H1
ctcgagccgctcgagccgcatttctagacacattaccctcacaaagtaagcaatggcataccacaactacaacaactatgggtggcgatgcccctctgacgagtaccaagtgtacgaccccccagtagaggcaacatatcctaggcaa

SEQ ID NO: 8435 - DNA, 149 bp, Glycine max
  Clone ID: 701101190H1
gttgtacgttccgacaataataacaaggtaaatagtgcataccctgatgaattccatggaagtaaaggtaaaattgtcaattgggtgcctcagaggaagatattgaaccaccctgccatagcttgcttcattagtcactgtggttggaa

SEQ ID NO: 8436 - DNA, 149 bp, Glycine max
  Clone ID: 701101191H1
atgatgagaagctgaagagatgggtggaggaaggtgctgaagttccagctgaagaagcttctgctctgccaccgcctccaacaactgctgctttccagaatggttcaactgaatacaactcgagatttgcattgaagactgaaagttca

SEQ ID NO: 8437 - DNA, 149 bp, Glycine max
  Clone ID: 701101192H1
ctcgagccgagaaatttagaaaacatggcagcggtggccggagcatcctcgtccgtgattaaacgtggctgcgctttcgggttctttaaggaaaggttcttacaacagaggcctcattcgttctgctattgagctaagcaaaggtagag

SEQ ID NO: 8438 - DNA, 150 bp, Glycine max
  Clone ID: 701101193H1
caagctccccggacggcaccggtgcttcttcatcggtggcatctaagaacattgtctccgagaggaatagaaggaagaagctcaacgataggcttttggcacttagagcagtggtccccaacattaccaagatggataaggcttctatca

SEQ ID NO: 8439 - DNA, 152 bp, Glycine max
  Clone ID: 701101195H1
gtagattttgcttataactggctttcaggttatgagggtggtgtcatccaagcttctgagttccgtacttatcacacaccagttaatagacaagtatgcagtgtgataagtgatgatcttattttcattgctttggcatatttctcttcata

SEQ ID NO: 8440 - DNA, 154 bp, Glycine max
  Clone ID: 701101196H1
atctggttggaaaattgtttcttgttttgaggggagatttcctgatagaatgaagcaattacctttagataggcattttgatatcaacaatgtgaagaggattgtgttagaagcagatggttatcagccgtatcttatttcccctgaaaaggga

SEQ ID NO: 8441 - DNA, 193 bp, Glycine max
  Clone ID: 701101201H1
tctctgtgttgtgttgtgtacttgtgttaattgtgttgttgttgtaggacatttaagtgaagagagaatgatgatgaagtctgctatgtgtgcattggtgcttgaggcactggttgtggttgaagtggggcccatggctgaggctgcggtgacttgcaacccaacacagttgactccttgtcttccggcaatt

SEQ ID NO: 8442 - DNA, 106 bp, Glycine max
  Clone ID: 701101202H1
atgacgatttcatggctctggtatatgttacaatcaatgtgtatgctgaactcgcctctagtgctctgtgcatcaatggaattagctttgcactaggagaagttag

SEQ ID NO: 8443 - DNA, 104 bp, Glycine max
  Clone ID: 701101209H1
ttttagaatgaaaactgatatcagtagtgaatgaaataatgcactgtccagtgggattctcgcttctgtacttgttgatctgttataggtaacagggaatctta

SEQ ID NO: 8444 - DNA, 203 bp, Glycine max
  Clone ID: 701101210H1
gttaactataatgctggagcacagacaacagtttcaaatataatcatggctgcagctgttctagtgacacttctgtttctcatgcctcttttctactatacaccaaatgttgtcttagcggccattatcatcactgctgtgattggtctaatagattatcaatctgcatataaattgtggaaggttgacaaacttgatttctt

SEQ ID NO: 8445 - DNA, 203 bp, Glycine max
  Clone ID: 701101211H1
caatttccagagaatatcgcacgaatcctaccctcccccagggcacggatctccttaccctccaccccaaccgggttacccatcggcgccgcctcatgaagggtaccctccgccgccgccgcctccgggatatggtgggtaccctccaccgcatccgccgcagcgtccgccgtatgactcctaccagggctacttcgacaacg

SEQ ID NO: 8446 - DNA, 203 bp, Glycine max
  Clone ID: 701101212H1
gccccagctcgagcgattcggttcactcacgctcgagccggaataatcggttacctccccacgaaaatactaaatgcaaaccctatttgcaaccatgtgaaggctcttcaatccagatcctcacacaagggaagctaagtgccccacgtatattaagagttcacaaagttattaattatgtaatagagaagatggtgcttgac

SEQ ID NO: 8447 - DNA, 202 bp, Glycine max
  Clone ID: 701101213H1
ctgatacagattatatcagagctcaggaggcccggcgcttcatgatttatgttcatgccaagatgatgatagttgatgatgaatacataatcgttggatctgccaacataaaccagagatcaatggatggtgccagagattctgagattgccatgggtgcttatcaaccatttcatttggctgccaggcagcctgccagggg

SEQ ID NO: 8448 - DNA, 201 bp, Glycine max
  Clone ID: 701101214H1
ctcgagccgttcggaacaagttggatgagagcctcctcattcattggtctgggattcagaccaggaggagttcgtggcaagatggtgttcttggcacaaactgtcctattcctgcaaagtggaactggacttaccagtttcaggtgaaggatcaaattggaagctttttctacttcccttcccttcatcttcagagagctg

SEQ ID NO: 8449 - DNA, 205 bp, Glycine max
  Clone ID: 701101215H1
ctcgagccgattcggctcgagtgtggtggaggaggaatacacgacgcaatatataggcaacgaaatgaggcgttttgactggccttttcggatctgatcgaatccaaaccctaatctaatcccacaagcctattagtctcattcaatcgaagaagcgagcgagtctgtgtctctctcccaggccatgcgaccaccctgttcctcc

SEQ ID NO: 8450 - DNA, 205 bp, Glycine max
  Clone ID: 701101216H1
gctttcttgttttgctattgcttgctccgcaatcataatttcatcatcgaatcaaatcaattttgaaggttcattataatggcggaagagataaccaagaacgacgtcggagtaacctccaaaaccaccagaagcagctccaggttctggcctcgttggattcccacttccaccgatcacatcatatacgccgagaagcgccttc

SEQ ID NO: 8451 - DNA, 201 bp, Glycine max
  Clone ID: 701101225H1
cataaacacatcaaactattagcaatttagcaccttctactactttgtaatcgttcaagagttgtgaactgtgaagaatgagttcaacaagccgtgcttggacttggagcgtggcagcaagtgttggagtggtggaggccttgaaggaccagggtatatgcaggtggaacagtgtgatgagatcagcacaacaacatgcta

SEQ ID NO: 8452 - DNA, 199 bp, Glycine max
  Clone ID: 701101227H1
gggagctcgaggtgcttcggggctttgtattggacatggtggtggacagagatgtcagaaacctggatgcaacaaaggtgctgagagccgaactgcttattgcaaggcccatggtggagggaagaggtgccaacacttgggatgtactaaaagtgctgaggggaagacggattattgcattgctcatggcggtggtagg

SEQ ID NO: 8453 - DNA, 200 bp, Glycine max
  Clone ID: 701101228H1
gtttgttttcggcctttgatcttcgattctctctctttttctctcgcgaaaaccgtatcagcaatgtctggagaatcagccagcgctattcacaagggtcaagtcgatctcttagacttcattgactggtctggggttgaatgcctcaatcaaagctccacccactctctccccaatgctatcaaacagggttatagaga

SEQ ID NO: 8454 - DNA, 200 bp, Glycine max
  Clone ID: 701101229H1
cacaagccaagtgaaagtgagaaaaaataaaaatcaaagagcataatgtcagggatcattcacaagattggggagacccttcatgtgggagggcacaagaaggaggaggagcataagggtgagcaccatgctggagaatacaaaggggagcaccatggtgaacacagtagtgagtacaaaggagagcatcatggtgaaca

SEQ ID NO: 8455 - DNA, 202 bp, Glycine max
  Clone ID: 701101230H1
tgaaatggtactgtagctcagtcgactttcaaaaggcagaagattaattaattttctgcaagtgaggcatgtggggattggggaccgtactttttccaatcaaattacacgtaacttgacattgacgccaaatccaagactccttggaagcgtagttttcttgccactagcaattggaatgatataaacatctctccatttt

SEQ ID NO: 8456 - DNA, 202 bp, Glycine max
  Clone ID: 701101231H1
ggcaacagaggagagaagatgaagttcaatccacgagtgtcgagcagccgccgcaagagccgaaaggctcacttcacggcgccgtcgagcgtgcggagggtgctgatgagcgcccctctgtcggcggactccggtcgaagtacaacgtgcggtcgatcccagtccgcaaggaggacgaggtgcaggtggtgcgcggaacata

SEQ ID NO: 8457 - DNA, 171 bp, Glycine max
  Clone ID: 701101232H1
tctccctccatggcaatggctaactctttctctgccgtgatcctccaccgccctcccatcaccgccctcgatcttctcctcatcttcctccataccctcttatagctctcacccgacaaagcaaaaaaagcacactttttttttttctttctgttttcggtttttttttta

SEQ ID NO: 8458 - DNA, 210 bp, Glycine max
  Clone ID: 701101233H1
attaacatatacaaattctctgtgttgtgctgtgtacttgtgttaattgtgttgttgttgtaggaaatttaagtgaagagagaatgatgatgaagtctgctatgtgtgcattggtgcttgtggcactggttgtggttgaagtggggcccatggctgaggctgcggtgacttgcaacccaacacagttgactccttgtcttccggcaatta

SEQ ID NO: 8459 - DNA, 206 bp, Glycine max
  Clone ID: 701101234H1
ctttgtcttttttctattatagaatgactcttatatttgttcaaatcaatatatatgctgactttcctctattgctctgttcagcaatggaattagctttgtctttggagaagttagtgaatgagaaacttctgaatgtgcacagtgtggcagatcgcaacaatgaccctcaattggcagacttcattgaaagcgagtttttgtct

SEQ ID NO: 8460 - DNA, 205 bp, Glycine max
  Clone ID: 701101235H1
ctcatcaaagagacgcccaggcggcggtgccacaatcgctaactgcggcgaccctgggcgactgtgagggtgcgaacaagaagagctcttaggttttcaaaaccattaatcgttgctgcttatttgatttgtttgagcaattatgaacaatgttgctgaaagaccgcttaacggagacgtagaggatgatgatgaggatgatggt

SEQ ID NO: 8461 - DNA, 204 bp, Glycine max
  Clone ID: 701101236H1
ggctgatcccaagcctcgtcttcgttggactcaggacttgcatgaacggttcgttgatgcggtaacgagcttgggggagcaagtaaagctacaccaaaagcaatcatgcggaccatgaatgtcaagggtttgactctgtttcatttgaagagtcatcttcagaaatacaggcttggtaagcaatctgggaaggatgtgggtgaa

SEQ ID NO: 8462 - DNA, 204 bp, Glycine max
  Clone ID: 701101237H1
aaaaagtcttaatttgtttcttgttttctctgtcgtttcgttcccttaatctttgatctctgagttacaagttataacaaaagaaataaacaacacatataaatatttgtaagaaaatatatatatgatcatgggttttcttcacaaactatgggacgaaacgtagtcgggtccagcaccggaaacgggtctggggaagctccg

SEQ ID NO: 8463 - DNA, 202 bp, Glycine max
  Clone ID: 701101238H1
cagcattcgttgcggcattttaatcgatttatccaagcaggactgaatgaactaatggagtctaaagtcgcgaaaaagaagtctagtagtagtagtagtaaatcattgttctacgaagctcccctcggatacagcattgaagacgttagaccaaacggtggaatcaagaaattcagatctgctgcttactccaactgcgctc

SEQ ID NO: 8464 - DNA, 203 bp, Glycine max
  Clone ID: 701101239H1
caacagaatctactctctttttttctaccttagattccttctccaacaatggctctcgccgtttccactacttcttcctcttaagcagctgctgcagcttctagctccttcttctctcgtctcggatcttcctccgacgcaaaagcttctcaaatcggttcgtttcggtttccggagaggtcgcttgtttcgtctgttgttgt

SEQ ID NO: 8465 - DNA, 202 bp, Glycine max
  Clone ID: 701101240H1
cgatgtctggtgagattccatgtgccacacctgatactcaatctgtgcgaactacttcaggttctctgggcccatctgaaaaggttcactcacttccctatgttgatccaaggcaaccagttccagtaagaattgtggacccatcaaaggacttgaattcttatggtctgggaaatgttgactggacagacagggttgaagg

SEQ ID NO: 8466 - DNA, 199 bp, Glycine max
  Clone ID: 701101241H1
tctctaaccattctcttgaggctgcaaaggttgctgtcacgtcgtttgttagaagtacattttctcatcttctgcaagacatctcagattccctcttacaaatcctgaaaaaggatggagcagaacagtgcactcttgatgttgttcttgatgcaagtacaaaagcagttctccaaggaggactgaatgtgttgctgga

SEQ ID NO: 8467 - DNA, 199 bp, Glycine max
  Clone ID: 701101242H1
cggcgaggagggtggcgccaccgccgagggcgagaagaagaagaagaagaaggagaagaagaagcatgaacatggccatgacagcagctgcagcagtgacagtgattagattatctcccactgctgcatcacctatatatcttataaggtgtatgggaccatagtagtgagggctgtgtctttctctttttttcctact

SEQ ID NO: 8468 - DNA, 197 bp, Glycine max
  Clone ID: 701101243H1
aactaattctactcaacagtacatataatccaccgctttgttcaactcaaatcctcaatcgctcgcgatttcttcttctggaattctcaaggatctcgataaatggcaaccactgcctgtttcatcattgttagcagaaatgacattcctatatatgaagctgaagttggagtagctgctaaaagggaggattctgc

SEQ ID NO: 8469 - DNA, 197 bp, Glycine max
  Clone ID: 701101244H1
ctcgagccgattcggctcgaggcgccactggacaccccagttttgcgatgtcctgctccatcaccaaccaggtcattgaccagcttgagttgtggaaggagaagagtaccggcaagtacgagaagaaggtttacgttttgcccaagcaccttgatgagaaggtggctgcacttcacctgggcaaacttggagctaag

SEQ ID NO: 8470 - DNA, 198 bp, Glycine max
  Clone ID: 701101245H1
gtcagaactcgtctgaaaaacctgataagcgtttcctttcggggtctactccagatatctttacctgtggaagtgatatttgtcattgcaggcagatatatgtcaagggccaaatttgtgagagtgatcatatttgttatgatgaacatggagatgcatgtgactgctccaatttccttgatgtggactggctttctt

SEQ ID NO: 8471 - DNA, 201 bp, Glycine max
  Clone ID: 701101246H1
ctcgagccgctcgagccgattcggctcgagggaggatttaggcctgggcccagaagctaccactcccaacagcttctatcagtacccaatcttcagcttttgtgaccccaacacctggcatgccggtaagtcatatatggattcagaaatcatctcttgcagctgatcatgcagctgctggaaattttgatactgcaatga

SEQ ID NO: 8472 - DNA, 176 bp, Glycine max
  Clone ID: 701101247H1
aattaatcatcttacttatttattctccgaaaatggttgatttacattggaaatcaaagatgccaagttccgacatgccttccaaaactctaaaactctctctctccgacaacaagtccttaccctctttgcaactacccttccgcacaacatacaacttcaaaaacacaccttct

SEQ ID NO: 8473 - DNA, 200 bp, Glycine max
  Clone ID: 701101248H1
accctccacaaccaccttattcaatctttaaatagcttattgattaatgtcttatagtcttctatgaataagatcttcagattttgttacagtttttcaaattattctgtggcaaggagagaagaaaagatcatagaaagtggtgattcttcgaatattgaagagagcaatatggggttgatattgaaggagacattcta

SEQ ID NO: 8474 - DNA, 127 bp, Glycine max
  Clone ID: 701101249H1
tgagtaaaaacctcaaactaagctccaaacgcttctttcgtaaaaaggaaccatttttagtctaacgctccgagccgccttctttcggatacggatcctcttccgttgactattcgacataacataa

SEQ ID NO: 8475 - DNA, 206 bp, Glycine max
  Clone ID: 701101250H1
caaaaaaggacattcattcatctatggctacccttattgctcccagcaaccactctccccaagaagatgctgaagctctcagaaaggcttttgaaggatggggaactgatgagaacactgtcatagtaattttgggtcatagaactgtgtatcagaggcagcaaatcagaagagtttatgaggaaatttaccaggaggatcttgtg

SEQ ID NO: 8476 - DNA, 201 bp, Glycine max
  Clone ID: 701101251H1
cagatttcggtcttgctagggagggcccaacgggtgatcagacccatgtatctactgcggtaagttgaagtcctataataaattttcactactattcaattatatgacttttcacatatgctattattcgtcaccattccaattactacatttggtccctttgtttgatgcatgaccaatccctaaagccgtaatttaagc

SEQ ID NO: 8477 - DNA, 203 bp, Glycine max
  Clone ID: 701101252H1
cagatgactgatgcagaactgagaaatatggttagcaagaccctcacttgtagaattgataagagagaaaactgcaatgagaagatggaccaatttctaaaaagatgtttctatcattctggtcaatatgattctcaggaaaactttgcagcgctagacaagaagctgaaggaacatgagggtgggagaacttctaatcgcct

SEQ ID NO: 8478 - DNA, 200 bp, Glycine max
  Clone ID: 701101253H1
gtttcgttactcgtattggaacagtagccagagttacgtcttaaccaaaggttggagccggttcgttaaggagaagaatctgaaagctggtgacacggtttgttttcaccggtccactggaccggacaagcagctttacatcgattggaagacgaggaatgttgttaacaacgaggtcgcgttgttcggaccggtcggac

SEQ ID NO: 8479 - DNA, 201 bp, Glycine max
  Clone ID: 701101254H1
ggaagaggttttggtgattgaagggattgagtttgagagaaacacacctgtgaaatttgatgtgtttatcaatgatgaagatgataagcagattcgaccagataatacagaatttgcaggaagctttgtgagtgtgcctcattcacatatgcacaaaaacaaggacatcattacttgtttgaggctgggacttacggattt

SEQ ID NO: 8480 - DNA, 200 bp, Glycine max
  Clone ID: 701101255H1
catattttaggttgggttacaacagcttgggtgcatttgcaaccattaaccatctccactttcaggcatattacttggctctgccttttccaattgagaaggcccctactaagaaaattgccaagttaagcggtggagtgaaaatatctaaactgttaaactatcctgtcagaggccttgtctttgagggcggtcattct

SEQ ID NO: 8481 - DNA, 201 bp, Glycine max
  Clone ID: 701101256H1
ggagaaattgatgttctttaatgtgaaaaagggttggaacggttttcgattttaataagcctgcaaagagccttcctttgtttttctctttttgagaagaaggctctttgttgttgtttttgaagaaggaaggaagaatgaaaaaaaatgttgaggctatggatttcttatctgcaattgttggagcttttcgtgagttcg

SEQ ID NO: 8482 - DNA, 197 bp, Glycine max
  Clone ID: 701101258H1
cggcaagaccaaaccggcgcgccgctcagctcctccaccaccaccaccacccccgtggtggcgccgatcagcgtggtggaccacggcctcccctacgacacccacaacctctacgacgtctccttcaacaacacccacaccatctacaccctcctcacctccgacccctccctcgtcgactcctggatctccaccgt

SEQ ID NO: 8483 - DNA, 194 bp, Glycine max
  Clone ID: 701101259H1
gtgatttggaaatggtttatgtggggcagttgtgcctttcttgggaatttcttcagtgggaatatgagaaggccttgaagctatgggaatctgaccaatacgggttgctaaggttcaatgaagtagcaggggaatttcaacaattccatgtccttctccaaaggtttatagagaatgaaccattcctccaaggt

SEQ ID NO: 8484 - DNA, 196 bp, Glycine max
  Clone ID: 701101260H1
acagctttgacaatttatctaaaatcaattacctattctcctttgctcgcattctcagtcactctttcggtgtttgccttcagatccgacggagggcaaccccatttagttaacattcagtttcagaagacagttagacttcaattaattgtgctgtacgtggatttcaagcttgacgagagttacacgccgagca

SEQ ID NO: 8485 - DNA, 196 bp, Glycine max
  Clone ID: 701101261H1
cacaagtctccctgttgagacagttgaggttgttgacacagcacatgctgaggaaaagacggggttcctcgacaagattaaggagaagctaccagggcacaagaacacagaggaggccacagctactactcctcctccaccaccacctgttgcatcattggagcatggtgaaggtgctcatcatgaaggagaggcc

SEQ ID NO: 8486 - DNA, 199 bp, Glycine max
  Clone ID: 701101263H1
cttctgactctcttgactcaccaatcatgtcggacgaagagcaccctttccagtccaaggccgacgccggagcctccaaaacctaccctcagcaagccggtaccatccgccagaccggctacatcgtcatcaaaggccgcccctgccaggctgtggaagtctcgacttccaaaactggacagcacggtcacgctaagtg

SEQ ID NO: 8487 - DNA, 208 bp, Glycine max
  Clone ID: 701101264H1
cggctcgaggacattcagcaacatcaagacataggtttagatgcttatactgactcagtatatggcaaattggatctgaattctgtacaacacatgtttctcaagggaatgtgtagttttggcagtactgattctcacatagttgagctttaccactgctcaggtgcgtcaatgccagcacgatgggagctgttccagaagccagctg

SEQ ID NO: 8488 - DNA, 205 bp, Glycine max
  Clone ID: 701101265H1
gtccaacaaagtggcaatccttaccgatcatttgacagtgatgtgctgcttttcaaatctggctcttcagttccatctgggggtggtgctattgaatttgcttcagctgttaggaagttggcttttcaggattctggtggtatttggaagtatgaaaaaaatggctctggtgatgctgctatcggctcaagtaggacttcaaatg

SEQ ID NO: 8489 - DNA, 204 bp, Glycine max
  Clone ID: 701101266H1
ctcgagccgctcgagccgtttctctctctcattctcttctccatcgcgcgtaagaaacacattttagttactactaatgggaactgttgaagctgcaaacaaggatgcaaatggaagtctcctagagaaaactccttcagttgtttttgtgttaggtggcccaggaagtggaaagggtacccaatgtgcaaatattgtccaaaa

SEQ ID NO: 8490 - DNA, 200 bp, Glycine max
  Clone ID: 701101268H1
gaatggtagagctctccttgttgcatttctgatgtttctgttggcatcagaagtgttgattttggaggctgagggtgcaggagaatgtggaaagacccctatagggtctgcagctgctagcctgagcccatgttacggtgcagttagcaatgtgagggcaaaggttccattggcttgttgtgccagagttggggctttgc

SEQ ID NO: 8491 - DNA, 155 bp, Glycine max
  Clone ID: 701101269H1
cttctctctggctttcctttgacgcttctgacactgctccttttgcttctctccgtgtcctaatggctctccccgactcttcttcctgccgcaactccctgttcccctccttcatctactcctcttcctccaaaacgctcccttcacacaacata

SEQ ID NO: 8492 - DNA, 58 bp, Glycine max
  Clone ID: 701101270H1
caagcatacgcacaagcacacgcacaagcacttctctaattcccttccacacaacata

SEQ ID NO: 8493 - DNA, 199 bp, Glycine max
  Clone ID: 701101272H1
ctctctctctctctctctctcattcacacgaatcacactctccacagtgcgattcattcaccaatggatcgcaacggtgttctctctcttgcattcatctgcattgtagtcgccggcgtcggaggccagtctcccgtcgcagcgccctcgaacactccggcaacccccgccgccgccactcccgcccaagcaccttcca

SEQ ID NO: 8494 - DNA, 105 bp, Glycine max
  Clone ID: 701101281H1
ccgtgttccaggagatggttcatgaattacgtaatgggagagaaaatcctgatggtgcagaccagggtttcatagctagctatttcccagagttacttgataagc

SEQ ID NO: 8495 - DNA, 200 bp, Glycine max
  Clone ID: 701101282H1
caaggatcctcgagaattgccatggaagaagactgttgttccagtggagtccatttcaactaagactccgactgatgcacaagaaaagaaatacaaagagcttgctgaattgggaggaatattggaagagaatagagatttatcttcattatcaaggtctaaacttgtagacagccagtttgatattgatggatctatgg

SEQ ID NO: 8496 - DNA, 198 bp, Glycine max
  unsure at all n locations
  Clone ID: 701101284H1
tagcctttgtttactcttcttctcttgcggctatggttttagcgcagttcttctagatttaagtatgatgggtaagtaaaaggttcacatcagtattgtggtcattggccatgttgactctgggaaatccattaccactggtcacttgatttacaagctttgaggcanngacaagcgtgttattgagaggtttgagaa

SEQ ID NO: 8497 - DNA, 196 bp, Glycine max
  Clone ID: 701101285H1
gtttgcttgtcaatgacactgtcttacatcttgtcgttgatactttgccatttgggggagctggggagagtggaatgggtgcataccatgggaagttctcttttgatgcttttacacacaaaaaggcagttctttatcgcagttttgctggtgattcatcattaaggtacccaccatacacggatacaaagctgag

SEQ ID NO: 8498 - DNA, 196 bp, Glycine max
  Clone ID: 701101286H1
tgttgatccatctcttgtttcttgctttctttcttcaccatgtcacttgctgggaaaatcaccactgaaatcggggttcatgcaaccgctacaaagtggttcaacctcttcgcaacacaactccatcatgttcaaaacctaactgatagagtgcatggaaccaagctgcatcaaggtgaagactggcatcacaacg

SEQ ID NO: 8499 - DNA, 196 bp, Glycine max
  Clone ID: 701101288H1
attccattctctctgtgtatttccctacctctcccttcaagatgcagatcttcgtcaagaccctcaccggcaagaccatcacccttgaggtggaaagctctgacaccatcgacaacgtcaaggccaagatccaggacaaggaaggaatccccccggaccagcaacgtctcattttcgccggaaagcaacttgagga

SEQ ID NO: 8500 - DNA, 259 bp, Glycine max
  Clone ID: 701101301H1
ctttgtttcttattgagtttttggcttctcacttctttttttctttcacactctcaacgaagcagtttataacagtgtttaattgaaattccaaacatggattgggttcgaggagacgctgtcggacgaggaagctttgctaccgttagtttagctattccaacggcgaattacaatcagtttccgtctctaaccgtggttaagtccgctgacgctcaaacctcgtgctggctcagaaacgagaaacacgtgctggatc

SEQ ID NO: 8501 - DNA, 267 bp, Glycine max
  Clone ID: 701101302H1
attctaaggacatcaaggacatgggctgccgctatgctaacccgcccatgcaagtgaaggcagactttggctcggttatggatgttttgaagacgtatttgcagagtaaggctcattaggttagcattgcaagttttgctcctcctgagtttgctcattatttacttacttttaggcactactgctgtattgtcttttctatgagctaggtttgagtgttgtaagaatttgcttgctgcattatgtatgccgtctagtgttccatat

SEQ ID NO: 8502 - DNA, 228 bp, Glycine max
  unsure at all n locations
  Clone ID: 701101303H1
ggtcaggacagtagcacataatcttcttctataacatcgaccggacacgtnctctcgaaaaatgctacctctgcgtccacaatcacaggttggagcaccaaaaacatcactgtctcttgtttcctcagaccccctcctatctcctgatgaacctaggcaaaactctgaccaatctccgtgaatctcaggccgaaagtcgaagtccagaaacagcttggccaagcactt

SEQ ID NO: 8503 - DNA, 254 bp, Glycine max
  Clone ID: 701101304H1
gctttttaattaattgggtactaggaaaaatatgcctgagatggtggatagtaatagcacaccctctagttccacaggttcaagaactgtccttctccttttgagggtcttaacctttgtgttccttctcattgcactcattctcattgcgatagtccagctaactgatgatgagataggcgtggaaatcaagttcaatgatatctatgcttatcgatatatgatctctacaataataattgggtttgcgtata

SEQ ID NO: 8504 - DNA, 133 bp, Glycine max
  Clone ID: 701101305H1
attggaggctcttgggctatggcaattgattcctgcaaatggaggaatgctcactgccctataccaactccactctcgcgatgtgtccagattcgtgctaagggtaccaagcttgagagtagtggtgaatggt

SEQ ID NO: 8505 - DNA, 77 bp, Glycine max
  Clone ID: 701101306H1
ttctatatggtgctcttactctattctgggctgcaacttacttagcttgaagtgcgatgctcagaacatgggtatgg

SEQ ID NO: 8506 - DNA, 258 bp, Glycine max
  Clone ID: 701101307H1
cgagtaccagagcaactttattcaattggtgtgcatggtggagctatcgatctctctggaaacaaaggtttgtgtggtgtaccatctctgccagattgtcctatgttttgggagaatggaaaactatctactcagggtaaaattgcaataggcttgtcctgtctctttgttttctgtgtgatactgctgctggtctatatttacattaggagaagaaggaatgactatgactttgctctacctcatgaattaacatca

SEQ ID NO: 8507 - DNA, 242 bp, Glycine max
  Clone ID: 701101308H1
cttcaattcagtaaaccgcaccaattccgatggcggcgtcgcggcggctccgggacctccaatcccaaccggcgaacaagatctgcgtcgactgttcccagaagaacccgcaatgggcctcggtttcctacggcgtcttcatgtgcctggagtgctccggcaagcaccgcggcctcggcgtgcacatctccttcgtgcgatccgtgacgatcgattcgtggtctgaactccagatcaagaag

SEQ ID NO: 8508 - DNA, 80 bp, Glycine max
  Clone ID: 701101310H1
tcttttgttcactaccttgaggttctagaaggtgctgatggggacaaaatgccaggctggccagcattccacacaacaga

SEQ ID NO: 8509 - DNA, 258 bp, Glycine max
  Clone ID: 701101311H1
caatttgataaacctaggggtttgatggaggggagatatagtggggattgatatgatgaaggtgtttataaggttgttctgttgaaattgtgtttttgggatggcaatattgtacgaaccagcaataaaactcatcgaccagatgagctagcatgggcgattcttgtcttacttctttgtcaatggagaatcatcacccttccacgctcttgtcaatatcctcaagtgcatcttctcacgaggaactggatttggaga

SEQ ID NO: 8510 - DNA, 260 bp, Glycine max
  Clone ID: 701101312H1
gaattcctcttattcaggaatttggagagtattgatatatcaaggtaggataaaccagtagccaaggaagatatggagttttctatgattttcattgttagcaacattatgctgcttttcagttcagcatttgccaaaactgctagtcctccctctctgagcccaactccagcaccagccccggcaccagacttcgtgaacctcactgagttactcagtgttgctggtccgtttcacaccttccttggataccttgagtc

SEQ ID NO: 8511 - DNA, 261 bp, Glycine max
  Clone ID: 701101313H1
cttccatacatggatatacaatgggattaaaacttgaacagtttatatttgatgcatttccatatgctcctacgactgcactttttgaggtgttacgggaggaggaatttgcaccagtgaaaaatgcaaatggatccaatgttgacactccagacagtgcgaaactacttgttcttcgactccatactcgttgggtagttgctgcaggtggcttcttaacacattcagtgcccttatatgcaacaggtgttgaagtgtcac

SEQ ID NO: 8512 - DNA, 260 bp, Glycine max
  Clone ID: 701101314H1
gttggaagtttgcttaaaagacacggagatttgacagagcgtcttgctagggattctgacaagataatatttgagcgtctacagaaggagtttgaagctgcacgagcttctcaaactgaagagatatgtttagacggggaagagtggaatgatggactactagctacaataagagagcgggtcactatggaggcagacagaaaagcacatgcatggggatgctgacatattagcatgtcctcaggataaaattacatata

SEQ ID NO: 8513 - DNA, 262 bp, Glycine max
  Clone ID: 701101315H1
cctaatcaaaccaaaacaaaagaaaacgaaaatccccaatcctgcgttgtgttgcgacttgcgagccatgagaggggtcgtgaaagcgtttgcggggaatctgttgttccatggaagaaagactcagactcagtgcattcgctcctacagtctgatcccaatggtgatagagcactcttcccgaggtgagaaggcatacgacatcttctcgcgccttctgaaggagcgcattatctgcatcaacggacccatctccgacgac

SEQ ID NO: 8514 - DNA, 266 bp, Glycine max
  Clone ID: 701101316H1
gaaattggttttgtatttttattttattcttctttattcagaatattattatattatgcatacacttgtgcgccgaacatttctttttcttttaccttaatttattgttgcgaatctttgttttgggtcatcgtttgttggttgcaggtaaagaaatctcgttgctttcccactaacgccccactttgtttcttttggtgttgcagatctaaacctcttgtgtgctgttcgcactctagactaactgagattttagctttttattg

SEQ ID NO: 8515 - DNA, 267 bp, Glycine max
  Clone ID: 701101318H1
caagacggtccagtgatcaatagattgccagtcgtcgtgtacgcggaactctccaattctgtttgagcctctctcgcgcactctctctctctctctctcatacacataaaacacacacatatcatccatatactttcctcatcatgtctggttccatcaatccatttgatgctcctgatgaagaatatgcaaatccctacgaacctcctggaggatctcataaacttaactctatatcgacatatggtcgtgtagcatctgatgcta

SEQ ID NO: 8516 - DNA, 265 bp, Glycine max
  Clone ID: 701101319H1
tttgggagttaggttctgcacgctctgcttccagcgagtgttctcacttcgtttcaacaccttaatttgcacacgctgcttcttcagcttgagaaatggcacaagaaacctttctattcacatctgaatctgtaaacgagggtcaccccgacaagctgtgcgaccagatctctgatgcagtgctcgatgcgtgccttgaacaggaccctgacagcaaggttgcctgtgagacatgcaccaagaccaacatggtcatggtctttgg

SEQ ID NO: 8517 - DNA, 263 bp, Glycine max
  Clone ID: 701101320H1
aatttaccagctatacttgttccttttgaaggttagaagtgctacaatacaaacaatggcagctactcaggaagatgtgaagcttttgggtattgtgggaagcccatttgtgtgcagggtccagattgcccttaagttgaagggagttgaatacaaatttttggaagaaaatttgggcaacaagagtgatttgcttctcaaatacaaccctgttcacaagaaggttccagtgtttgttcacaatgagaagcccatagcagagt

SEQ ID NO: 8518 - DNA, 259 bp, Glycine max
  Clone ID: 701101322H1
tagagaagcactcttcgttcttcgactgtctacgatctgctttctctgaattgtgaaaatgtcgctcggagaaactgcttgttcatacgcagctctcatccttcatgaagatggaattagtgtaactgctgacaagatcagcaccttgttgaaaactgcaaaggttccagtagactcttattggccaaccttgtttgctaaacttgctgagaagaaaaatcttggcgatttgatagcaaatgcggcaggcggtggtgca

SEQ ID NO: 8519 - DNA, 257 bp, Glycine max
  Clone ID: 701101323H1
atgggagcattgcttcacagggaaacacaaaacctgacatggagattgtaacaagggttatgggacctgaagttggatatctgaccacaccaataattcttattcagtgtgctcttgttcttctctgccaacgtgacaaccttccaaaaggaggagtttaccctcctgggatcatctttggtccaactgatctccaggaaagacttcaacaaaatggaatatcctttgatgtcatctcaaaaagcaccatttcttga

SEQ ID NO: 8520 - DNA, 260 bp, Glycine max
  Clone ID: 701101324H1
cctcgagccgaatcggctcgagggcaaaattcgcaccctcggcgaactcaaacgctcctcccgcgatgatgattccgattccgatcccgatttcgaacccgacgagtactacaccggcggcgaaaagagtgggatgcttgttcgagatcctaccagaggaaacagcaacaacaacaacagtgtggatgatatctttgatcaagcgaggcaggttgctgttgatgcacctccggagaatcctcgaagctcgtcgaggtcgg

SEQ ID NO: 8521 - DNA, 257 bp, Glycine max
  Clone ID: 701101326H1
ctttgagagagagagagggaggagggagagtgttgacgctccatcaagatgggtatttctagggattccatgcacaagaggcgtgccactggtggcaagaagaaggcatggagaaagaagagaaagtatgagcttgggcgtcaggccgcaaacaccaagttatcaagcaacaaaactatccggaggattcgtgttcgaggtggcaatgttaaatggagggcattgaggttggataccggcaattactcatggggtag

SEQ ID NO: 8522 - DNA, 261 bp, Glycine max
  Clone ID: 701101327H1
ggccaagacaaatcacagaactggcatgtctactctgcttctgcagattctgtaactccatgcgacaatgtttacactctagagatgtgcatgactggcctggatagagagaaagcacaggttttctacaaagaacaatctgcttcagctgccattatgactgttaattctggcattagaaaaattcttccagattctgagatttgtgactttgactttgagccatgtggttattcaatgaactctgttgaaggtgctgct

SEQ ID NO: 8523 - DNA, 238 bp, Glycine max
  Clone ID: 701101328H1
catttgggagttaggttatgcacgctctgcttccagcgagtgttctttcttcgtttcaacaccttaatttgcaactgatgattgtgccgcttgagcactggcacaagaaaactttctattcacatctgaatctgtcaacgagggtcaccccgaaaagctgtgcgaccagatctgtgatgcagtgctcgacgcgtgccttgagcaggacacatgacgcaaggttgactgtgaaacatgc

SEQ ID NO: 8524 - DNA, 252 bp, Glycine max
  Clone ID: 701101330H1
ccctcgagccgaatcggctcgagctttctccgagaacaacaaaaacctcgtgcttcgctcttaccttcgaataacccacaaaaccaacaaacgagaagaggagtgacagcagatggggttgtcgttcacgaagctgttcagcaggttgtttccgaagaaggaaatgaggattctgctggtaggtctcgatgctgctggtaagacaaccatcttgtacaagctcaagcttggcgaaatcgtcaccaccatccc

SEQ ID NO: 8525 - DNA, 261 bp, Glycine max
  Clone ID: 701101331H1
cctcgagccgaatcggatcgagatttgagtttgctataatcacacgctcaaccacttagtcaaaagccttatctgagtttacctctgtgtctctcggcgcatcaaccctatctgtctgccgttgcatcagtaaagtcatcttagatggttgaacaagacttcctcagcgagcacatgaacgcctcactctcaagactgacattttgtatgagctaagctgttatacggagaacgatctcacgagttacatcgacagagtcg

SEQ ID NO: 8526 - DNA, 266 bp, Glycine max
  Clone ID: 701101332H1
ggagcttcaagactgaccattttgttagtgacacgggggatgttgtgtactatcaaaccgactctaagattaatggctcttccaaattagagtgaatattaaaattcttttctatatagacaagagaggcttatacacaattcttattgctttaaagattgtcttgagtttctccgaaagttactgcacttacttggagttgaatccttcattaataaagggatggatggatcatataatttcaattgtaactgcatgatagaatg

SEQ ID NO: 8527 - DNA, 70 bp, Glycine max
  Clone ID: 701101333H1
ctcgagccgctcgaaccgattccgggcaaggtcgcttggaccggcggtcgaatgatgagccgcagcctca

SEQ ID NO: 8528 - DNA, 268 bp, Glycine max
  Clone ID: 701101334H1
tgaagttgctctctctgtaaccccccaaacccaaaccttcattatctcaattctcacactcccatttctcccttctcttatttattattattacacacatcatcacaattctgtcaatttccccgaagaaaaaaaaaccctaaaaaatttgctcctttggatccatccaggggcacaccccggatctccgattctctagatcactctcaagttctcatctttttcgtttttggcgcagtgggtcgttgttaaatacatggtttctgat

SEQ ID NO: 8529 - DNA, 262 bp, Glycine max
  Clone ID: 701101336H1
gaacaactacttcttcaaacaacaacagattcaagttcatagttttttttggtaaaacagaaatggcctaccactcttctcaaaattcccaacctgctctccctatgcacctatgtttcttcttgctcaccttgttcatgttccttagtttctcattttactcaagctacgagccaataatggagagtttcatggaccaagtgaagttggttctaatggtttctccccttctgcttctgctagttgtgcacttcctttgcaa

SEQ ID NO: 8530 - DNA, 261 bp, Glycine max
  Clone ID: 701101337H1
ctcgtaacgaggagaaggcccagtcgatgctcaaccgcttcatcaccatgaaggcggcggagaagaagaagccgaaggagcgccgccccttcctcgcctcagagtgccgcgacctctcggaggccgacaagtggcggctacagatgctgcgggagatcggccggaaagttgccgagatccagaacgagggtctcggcgaacaccgcctccgcgatctcaacgacgagatcaacaagctcatccgcgaaaactcccactggg

SEQ ID NO: 8531 - DNA, 258 bp, Glycine max
  Clone ID: 701101338H1
cagaaattgttgtccctgactggcgtgggcgtctgtgtatgaatgtgtttgtgagaaaatggaagctgcgatgggcatgatgcggaggattcctccgaaacacacagaaacagctctgtcagcgcttctgagacttatgcctgacaactcctccgatctcctctctcaagtcgatcagcccctccaggttctgtgcgatgtggaatgcggcaaggagttcattttgtgcgaatacaatagagatgccgactcttacag

SEQ ID NO: 8532 - DNA, 254 bp, Glycine max
  Clone ID: 701101340H1
acttcacccattcatacgtggtgttgttactgctgctcttttctcttttcttttctctttagttctctcttcccctttctttttctttttcttcttcttctgagcttgtttaagcttttcttccattaacatattatcagaatgtgtggtattcttgctgttcttggttgttctgatgactctcgagccaaaagggtccgcgtgcttgagctctctcgcagattgaagcaccgtggccctgactggagtgggct

SEQ ID NO: 8533 - DNA, 255 bp, Glycine max
  Clone ID: 701101341H1
tgagaaataaggggaaaaaatggtgtcgctgaaactgcagaagcggctggccgcaagcgtgctcaagtgtggcagaggaaaggtgtggcttgaccgcaatgaagtcaacgaaatctccatggccaattctcggcaaaacatcaggaagttggttaaggatgggtttatcatcaggaagccaaccaagattcactcacgctcgcgtgctcgtaggatgaaggaggcaaagaagcagggccggcactctggttatgg

SEQ ID NO: 8534 - DNA, 255 bp, Glycine max
  Clone ID: 701101342H1
ctctatattgattccataaggggttactcttcttccttttgttaccaaaaaaaaaggccatgattttctcactgatggtgaaagcactagctggctgatgtgtgattgattgtgcctgcctcagttctgtgtgagagtttcagcaagtggctcagctgatgaggagaggactattataaggaaagagaaagttgggtggaagatcaattactcaggagagaaaccagcaacaccattattggacacagtcaacca

SEQ ID NO: 8535 - DNA, 252 bp, Glycine max
  Clone ID: 701101343H1
attattttctgcgtcaattttgctgaaaaccttaagtgggtatcctgaaaacactagattttcgattcgtttggtaagcggatttttaggtttgattattacgtttttctgttcttgttggatatggaggtttcggtgattggaagctctcaagcgaatctgggagcgtcggaattggcatctagggacgttggattttgcaatcttaagaacaatttaagggctttgaatgatagagttagttttggtagg

SEQ ID NO: 8536 - DNA, 259 bp, Glycine max
  Clone ID: 701101345H1
ctcgagccggttttgcttttgccacttcgaaaccaaattttcttcgttcgtccttctgtgaactcttcttccaccatgagcaggtcagggcaaccaccggatttgaagaagtacatggataagaagcttcagatcaagctgaacgcaaatcgcatggttgttggtactctccgtggctttgaccagtttatgaatttagttgttgacaacactgtggaagtgaatggcaatgagaaaactgacatagggatggtggtaa

SEQ ID NO: 8537 - DNA, 254 bp, Glycine max
  Clone ID: 701101346H1
tttagaaagaggagagagaaagagaaagagaactcgttcttctttttccattaacattttcaatttttttcacctaacacatcatctcctttccattcctttcttccttcgtcccattctcgaattggcgtgtgcctcttgcaatccctcacaggttttttgaagcagtagaatggacttctttactagagtcatacatgaggattctatgcttagatgctcatactttaggaacatcattgggcctactaact

SEQ ID NO: 8538 - DNA, 262 bp, Glycine max
  Clone ID: 701101348H1
gagttaccacaacttcaattgtggttgcatccgctgtaatatcaaaggatcgtgacgaaaccacaactgcaacaaccgcaatttaaaacctttgtgtgagaataatgcgtactacagcagaatttcaaggctctgttctgaatcttcgtggggttcaggttcactccatggagggttcaagcatggagcaagagcttgatttgtttcagaagcatgtgacagagcgattcctggagctatctttggctgaacatggtgaatt

SEQ ID NO: 8539 - DNA, 264 bp, Glycine max
  Clone ID: 701101349H1
gaaaaaaaaagaacatagttatttatttttggttcatggccgttcaagctcaatatccatccaatgtcctttatctaaacagcagaaacgatatagaagagcatgagtattcttcattgcaaccacaaccaggaggagttgtactcttgaatcagcctcacatgttatacaacatcaatgacaatggaagtaacaataacaacaacaataccaattctcggaagagaggtagagaagacccgggtgttggcaacaacacaatca

SEQ ID NO: 8540 - DNA, 265 bp, Glycine max
  Clone ID: 701101350H1
gtggcggtggccatgatccatttgatatcttcagttcattctttggtggaagtccgtttgggtcaggtggtagcagtagaggacggaggcagaggcggggagaagatgtggttcatcccctgaaggtctctctggaggatctttacctcggaacttcaaagaaactctctctttcacgaaacgtgttgtgctcaaaatgcaatgggaagggctcacagtctggggcttcaatgacctgtgctggttgccagggtactggcatgaa

SEQ ID NO: 8541 - DNA, 255 bp, Glycine max
  Clone ID: 701101353H1
gtgattgttgaatacattgatgagacattgaagaacaaccccatcttaccttctgatccttaccaaagagccttggctcgtttctggtccaaattcattgatgataagattgtgggtgctgtatcgaaatctgttttcacggttgatgagaaagagcgtgagaagaatgttgaagaaacatatgaggctcttcagtttcttgagaatgagctgaaggacaagaagttttttggaggagaggaatttgggttggta

SEQ ID NO: 8542 - DNA, 256 bp, Glycine max
  Clone ID: 701101354H1
cccaaacaaaaacaacacatcacggagcccccaaccatggcttccaagctctgcgactcatgcaaatccgccactgctaccttgtactgccgccctcacgccgcgttcctctgcggcgcctgcgattctaaggtccacgccgccaacaagctcgcgtcgcgccatccgcgcgtggcgctctgccaagtgtgcgagcaggccccggcgcacgtaacctgcacagctgatgccgccgcgctctgccttgcctgcgacc

SEQ ID NO: 8543 - DNA, 251 bp, Glycine max
  Clone ID: 701101355H1
catatcgcgtatctttctctgttctattcctacgacggattttggggtgccgaggttaaggttggtgagtctgttaaggtagatccagccgaattcgaggcatgcatacagctttctcatgctgctcttggtgaggcaaagaaagacatatcagatgaaccatttgttctctacttgaaagttggtcaacagaaatgtgtcttgggaatcctttccagggctataattcctcaagtacctctggaattggt

SEQ ID NO: 8544 - DNA, 252 bp, Glycine max
  Clone ID: 701101356H1
atccagttgacattagtattcgtgttcaaaggcgcagttcaaaaatccttctacaattcggtgatcatggctgaggtcaaggttctgcaacactgcttttgtcgcagtgggcagcctatgcctttagaggaactttatgtctgccgtgaatgcgatacttttgttgctccttttgtgtaaatcaagagatcgaatcgtacttctgcacgaactgtctggaaaatgttcttcagtctgaggcagcactattat

SEQ ID NO: 8545 - DNA, 255 bp, Glycine max
  Clone ID: 701101357H1
aaagccatagtttgtcacttctcttcgccttttgctttgcaattgtcaccaaacaattcttgcttagctctcacaagcaagcattatcaacaatgaagaaaattgtgttaaaggtggacttacatgatgacaggatcaagcgaaaagctatgaagacagcatctggcctttcgggtaaatcaaaattttcaaccctactacaactttgctttgtttcaagaagccaaatagccagtcagctgcagcatcaaggaa

SEQ ID NO: 8546 - DNA, 256 bp, Glycine max
  Clone ID: 701101358H1
ttcccctgttgatgagactgttttcgatgtggataacgatgttgatgaccttctgccagttgaagttaaagaacagcgcctcagcaatctgctgcaggcattgatggttgccgcttgtgttgctgctatgcctcttttgaagaagataccaacttcagtgctttggggttactttgcttttatggcaattgacagcttgcccggaaatcagttttgcgagagactattatatcttttcactgctccaagtcgaaga

SEQ ID NO: 8547 - DNA, 231 bp, Glycine max
  Clone ID: 701101360H1
tcgagccgctcgagccgatctttctctcttctctctccccgcccaaaccctaactccctaacctattccaccttctctcatccaacacgaaaggaggaaagtccacgaccgaatctaagagagccgatgccaaacttgctgtgaatcagaagggcgccgccaccaagactaggaaacccgccggacaggggaaagcagcgaaagatcctaacaagccaaagaggcctccaa

SEQ ID NO: 8548 - DNA, 259 bp, Glycine max
  Clone ID: 701101362H1
atttttggcagaaaatttgggcaacaagagtgatttgcttctcaaatacaaccctgttcacaagaaggttccagtgtttgttcacaatgagcagcccatagcagagtctcttgtgattgttgaatacattgatgagacatggaagaacaaccccatcttaccttctgatccttaccaaagagccttggctcgtttctggtccaaattcattgatgataagattgtgggtgctgtatcgaaatctgttttcacggtggat

SEQ ID NO: 8549 - DNA, 264 bp, Glycine max
  Clone ID: 701101363H1
cgggcgtggagagcgatgaggacatagaagatgttacggaggagcaagagaaggtagaagaagaagaagaagatgatgaaataattgaatctgatgttgagctcgagggtgaaacctgtcagtctgatgatgatcctccacagaagatgggagacccctctgtcgaggtcactgaagagaatcgcgacgcttcgcagatggccaaaattaaagccatggatgctatttctgaaggtaagttggaggaggcgattgagaacttaa

SEQ ID NO: 8550 - DNA, 262 bp, Glycine max
  Clone ID: 701101364H1
cagaaatgttgctgttttccaagcaaatccgcttatgaatgggctttcaccttctgactatgttctaagtgcattttcagatgttcactccaatgatttggagcaaacattattggctttaccattttcagatgctttgaagcttctgtcgtacttgaaagactggacttcatactctgataaggttgagcttgtttgcagaataggcacgctgctgttgcagacacattacaaccagcttcttgccacgccagctgcccga

SEQ ID NO: 8551 - DNA, 267 bp, Glycine max
  Clone ID: 701101365H1
cgagaatgggaagaaagaccgggtatgttgagttcgaggagtcgccgccggacgattttgatccggcgtctccgtacaaggacccggtgcgcgatgctggagatgagggagcacatcgtgagagagaagtggatccaaatcgagaaggccaagatcattacggagaagctccgctggtgctaccgcatcgaaggcgtcaaccacctccagaagtgccgccacctcgtcaaccagtatctcgagtccactcgcggcatcggttggggc

SEQ ID NO: 8552 - DNA, 87 bp, Glycine max
  Clone ID: 701101366H1
tcgttatcatcttcttcttcctctaacttagatctcttctttctctacgccgtacgccgaaaccatggccggacaatgcgatggtcc

SEQ ID NO: 8553 - DNA, 256 bp, Glycine max
  Clone ID: 701101368H1
atgtggtccaagatggagacattatattctttaagttcaacgtttctggtgggggcaagaagtaaatccagcgattcatctcaaatagcagagctggttttgcatggagtttgttttattataggtgcctaccatattgcacaatttgtagaagtttgaaaatgtaatttttggaccattttcaatattatttacttatttaggcttattaatatctctagtggattttgacctctcacctatttccatgatttat

SEQ ID NO: 8554 - DNA, 256 bp, Glycine max
  Clone ID: 701101369H1
gtcctattgggaaggagtgtgctgatttgtggcccaggattgcaagtgctgcaaatgctattgtttaagctgggtttttagtttatgtaatgtttctgcttcttgaagttgtttcagatattgttttaggttgaattgcagacaatattggcatttggcacatatagtttgtttttgcttgacttctcagtgagaagtgttttgatgagattaattgatagttaaaaaaaaaaaaaaaaaaaaaaaaaaaaaaaga

SEQ ID NO: 8555 - DNA, 254 bp, Glycine max
  Clone ID: 701101370H1
gcaagcattactactcttatatgggcaacaagtttgatattgaataatcctagtgtactagaaaaacttaaagcagaactagacatccaagttggaaaagagagatacatatgtgagtctgatttaagtaagttaacatatcttcaagctgtagtcaaagaaactttaagattgtaccctccagctcctctctcaagacctcgtgagtttgaagaggattgcactataggtggctacactgtcaaaaagggaac

SEQ ID NO: 8556 - DNA, 251 bp, Glycine max
  Clone ID: 701101371H1
aaaaatgtcctggctcttcaagtccaaccaccctgacccagaatcttctactctccacaaccgcaccgttatccactcgtcttcgccgccgcatcccgccgccgatcgccacggcgtcaaggacgacatatcgcatattttccgcggcgtcgccaacttcctcgctccgccgccgccgtcttcttcttcttcttcttcttcttcttcttcctcctccgccggcgattcctcctcctcgcaagctctgtcag

SEQ ID NO: 8557 - DNA, 251 bp, Glycine max
  Clone ID: 701101372H1
cttggaattgcgccccatgctgacaattctgggatcactcttctgcttgactgtgctgattttccagggttgcagttcctcaaagataaaaaatgggtcaatgttgaacctatagaaggggcaattgttgtaaacattggccaaattattgaggtgatgagcaatgggatatacaaagcgccagagcatagagctgtagtaaataagttaaaggagaggttttcaatagtgacattctgctatccaagccc

SEQ ID NO: 8558 - DNA, 253 bp, Glycine max
  Clone ID: 701101374H1
cgtagcacattgtataaaattggtctggcagatgaaagtatggtcaggtcagcctcattcttaatattggagcagaaattttttgagcttctaaatggtgaaaaggtcatggaagcgttgaagaccttgaggacagagattgctccactttgcattaatagtagtagaattcgagaactttcttcctgcttagtttcagcatcttctaggctagacattctaagggtgaggtctcgatcaaagcttctggagg

SEQ ID NO: 8559 - DNA, 255 bp, Glycine max
  Clone ID: 701101375H1
acaaagcattgaattcaaaaactaagttcatttcttgtgctttgctttattcctcaaaaccaaacatgtcgaacacatgcggcaactgtgactgcgctgacaagactaactgcaccaagggaaacagctatggtgttatagtagagactgagaagagctacatcgagactgttgacatggatgttccagcagctgagcatgatgggaagtgcaagtgtggcactaactgcacttgcacggactgcacttgtggcc

SEQ ID NO: 8560 - DNA, 257 bp, Glycine max
  Clone ID: 701101376H1
ctcgagccgctcgagccgcttcgatttcatcgtgttgatgatagggtcgctctttctgttcaaagctttcgattttactttctgtgtctccttcttctgcttcttttgattcccccaaatcttcagttttaaaaaccctaatctgctgccatgaggaagaagctcgatacccgtttccctgctgctcggataaagaagataatgcaggcagatgaggatgttggaaagatagcactggctgtgcctgttttagtttc

SEQ ID NO: 8561 - DNA, 239 bp, Glycine max
  Clone ID: 701101377H1
ctcgagccgcttttgtgccgaaccatggatcctccaaggaagaagaagaacaggacgatacggcgtcgcagagctgagaaccctagggaaacagacttctctcttccggctcgcacatcaataccctccctctcctactcaccgccgtttccccctcttcccctcctcaccacgttctcgaatccctcctctcgctaccactccttactcatcccactcctccccaagcttccttcctc

SEQ ID NO: 8562 - DNA, 256 bp, Glycine max
  Clone ID: 701101378H1
cgcttctcgatgtacatgagaagcaaatgcttgtgcggatgctttggccaatttgtcttatggcttgcagttgggttttatgatgcatgagcaacctcctgctatcagtcaactgttgcttgctgacagtagaggagttgtttctcctcgcattatttctttgtagtttcctttgggcttttgctctgtttaataccaaaacaaaaaaagctttgctgcttttattctagtggtgcattgtgtagatcaattgata

SEQ ID NO: 8563 - DNA, 261 bp, Glycine max
  Clone ID: 701101379H1
gaagaatccaaaagcaatcccatctgtgtgtttgcacatcagaagggagggctatcaaactcaaaggattgctctgaatcggtttagtcttcttcgtttttcttcaaattcctcgtgacagatctaatctaatcaggcttttgggggtgtttcagacattgcatgcatatgggagcagtggttgtgttggatgctataaaaggcctacactgagtgctactgtggatgtgccatcgaaagggttggcaacacaaggtaacg

SEQ ID NO: 8564 - DNA, 261 bp, Glycine max
  Clone ID: 701101380H1
gtggacttcagggagtaacagatgcagggtttcttccactgctggagagctctgaggctggtctggttaaagttaatctaagtggttgtgtaaatctgacggacagagtagttttatccatggtgaactcacatggatggactctcgaggtgctaagccttgatggttgtaaaagagtcagtgatgctagcttgatggctattgcaggtagttgcccagtgctcgatgatctcgatgtatccaggtgtgcaatcactgata

SEQ ID NO: 8565 - DNA, 260 bp, Glycine max
  Clone ID: 701101382H1
ttcaggcttagatcgcttaccacaccataccatatggctgttactgtggccatgttacctcgttggtcggtgtttcttctttttctgtttgtcttgtgtagctcaggagcaaaggttgtcgccattgatgtacatgcagcaaagcgtctcatccagaccggttccatttatcttgatgttaggacggtggaagagttcaagaaagggcatgtggatgcagttaatgtccttaacattccatacatgttgaatacacccaa

SEQ ID NO: 8566 - DNA, 259 bp, Glycine max
  Clone ID: 701101383H1
tctctttctcttccttctcatcattctcatattattgtcgccacttcgacctcaatcaccctcgcgccctcgctcttcccttcctggtggcgacaatgtcgactcctgctaggaagaggctgatgagagacttcaagaggctgcaacaagacccgcctgcagggatcagcggtgccccccaggataacaacataatgctgtggaatgctgtcatatttggtcctgatgatactccatgggatggaggcacgttcaagtt

SEQ ID NO: 8567 - DNA, 255 bp, Glycine max
  Clone ID: 701101384H1
ttttgaggttccaatacaaatggacatatctgctcaaaaaatgatatttggtgtgcctgggattgatcctcaaagaagagccgagctaatcaaggtattagatatcgatctttcctggagattgcataaagtatctgatggtcaaagaagaagggtgcagatttgtatgggtctcctcaaaccattcaaggttcttcttctcgatgagacaacagttgaccttgatgttctagcaagagctgaccttctgagatt

SEQ ID NO: 8568 - DNA, 235 bp, Glycine max
  Clone ID: 701101385H1
tgctgttccccaactccatggtaatagaagggtattgccattgagagcatctgccatagtgtaaagtatatgtagaccagtgtcgttgataaacacggtgcacaattgattgctgtcgctattcgtgctgatgcaagaacatgggactcacatcgtattgcatccctaaatcgtaccactgctaaaggtgttgtgcaacatgatataccgtcctttgttcagttaattcgtttaa

SEQ ID NO: 8569 - DNA, 255 bp, Glycine max
  Clone ID: 701101386H1
ctccgagccagcgagcgagaatcagactcaagaagaaaacgtgttatgttactcttaccccttgctctttttctctctttcttgaatttggcgcgtgcgtttcgattcttcttccgaatcagagggattctggatttcttgttgaagatgcgacgctcttctgcatccaaaaagtcgggttaatccaattccactcccaacgccggcgatctcttccgctctgatgtcaagtaaggcaagctcgaaggaatcaga

SEQ ID NO: 8570 - DNA, 254 bp, Glycine max
  Clone ID: 701101387H1
actcgagccgattcggctcgagtatacttgttccttttgaaggttagcagtgctacaatacaaacaatggcagctactcaggacgatgtgaagcttttgggtattgtgggaagcccatttgtgtgcagggtccagattgcccttaagttgaagggagttgaatacaaatttttggaagaaaatttgggcaacaagagtgatttgcttctcaaatacaaccctgttcacaagaaggttccagtgtttgttcacaa

SEQ ID NO: 8571 - DNA, 255 bp, Glycine max
  Clone ID: 701101388H1
ctctgtctctctctctcggtctcgctcttcttctcatcaagcacagagttacagactcaccgatcttccgattctctttcgtcttggtttatgagctcgaaggagagacccactcttggtggcacgcggattaagacccgcaaacgaaatattgctgcgccgctggaccctgcagcattctcggatgcagtggtccagatttatttggataatgctggtgatctggaacttattgccaagagtattgaatcttca

SEQ ID NO: 8572 - DNA, 255 bp, Glycine max
  Clone ID: 701101389H1
cgtattttcatgtccttcgcctgcagatagcgcagacccaagttacttctagaacctccgtgttccgcgaattacaccccaccctcaaacaaaccacttgcacatattctgagagaaagagtattgaatcctcatcctcttccttccattcctcaagaaccctaatcccaatcagccatgcagcaaggagactacacctccgctccatctccatattatcaattccctcatctccaaaaccccaatcccaatccc

SEQ ID NO: 8573 - DNA, 254 bp, Glycine max
  Clone ID: 701101390H1
cttgcaactgcttggcatgccatcttgaccgggaccatcttcactgtttattacaaacctaggaccagtcccgccgaatttattgttccgtatgatcaatatatggagtctttaaaaaatagttatagcatcgggatgcggttcaaaatgaggtttgaaggtgaagaggctccagagcagaggtttactggtaccgttgttggaatagaagatttcgatcccaaaaggtggagagattccaaatggagatgcct

SEQ ID NO: 8574 - DNA, 225 bp, Glycine max
  Clone ID: 701101391H1
ctagctactagcatcttcttgcatcagcacattcatgttaatgaggattctctaggggtggtttccaatcaatatcccgtaattttgtctccagtgctttccggttcaatcaccaatgcatgagtgaatttgttaatttcgtaatccaataacagcatgatgacacatgacacatcctccgtttccggcgggggaatcgtgtgtgtgaacggtgccggcgggttc

SEQ ID NO: 8575 - DNA, 255 bp, Glycine max
  Clone ID: 701101392H1
gtttgttccatctcttgcttcttgcttctattacttgcttctttcttcaccatgtcacttgctgggaaaatcaccactgaaattggggttcatgcaaccgctgcaaagtggttcaacctctttgcaacacaacttcatcatgttcaaaaccttactgatagagtacatggaaccaagctgcatcaaggtgaagactggcatcacaacgagacagtcaaacactggacttataccatagatggtaaggctacaaca

SEQ ID NO: 8576 - DNA, 260 bp, Glycine max
  Clone ID: 701101393H1
gcaagccccactcaagcaccacacctctcctcgttcacgctacccctttctgctcttcttctacctttcaagttttaaaagtataaagatggcagagacattcctatttacctcagagtcggtgaacgagggacaccctgacaagctctgcgaccaaatctccgatgctgtcctcgaaaaccaactcgagcaggacccagacagcaaagttgcctgcgagacatgcaccaaaaccaacttggtcatggtcttcggagaaa

SEQ ID NO: 8577 - DNA, 258 bp, Glycine max
  Clone ID: 701101394H1
gtggtgctggtccagatagctaatcctgcgagggggcgagggaaagatgtgaaagaagtgcaagccgagacgaaggccacggtgaaacgaattaatgaaacatttgggaaacccgggtatgatcccgtcattctgatcgaggagcctctcaagttttatgagagagttgcttactatgttgtcgcggagtgttgtttagtcactgcagtaagggatggaatgaatctcataccgtatgaatatatcatcagtcgtcaa

SEQ ID NO: 8578 - DNA, 262 bp, Glycine max
  Clone ID: 701101395H1
ctcgagccgctctgctctctctctctgtctcctacgattcgttttgccccttttgttgccctcatttcaaccatgcctcgccgtagctccggtggaagatctgcccgtcctgctcctcgggcagctcctcgtcctgctccagttcaccatgctcctcctccagcccctgctcagagtggtggtggatctatgcttggtggcattggttcaaccatagctcaaggtatggcttttggcaccggaagtgcagtggcacacaggg

SEQ ID NO: 8579 - DNA, 266 bp, Glycine max
  Clone ID: 701101396H1
cacaaaccctcccctcacactctccaaaccctagcggcactacacacgttatctctctctctctctctctctctccctctctccttccccaagatgtcgagcgccgatcccgagcaccgagaagaggaggaggcacccgccgtcggcgacgacgaggacaccggagcacacgtcgctcccatcgtcaagctcgaggaggttgctgtcaccaacggcgaggaggacgaagatgcaatcctagatctcaaatcgaagctttaccggtt

SEQ ID NO: 8580 - DNA, 234 bp, Glycine max
  Clone ID: 701101401H1
aacgcaaccccctcttttagcgttcgaacaaaattagggttttctcaaccctagggtttaccttctcttcccctgttcgaaattaggcaaatcaaaacagaaacacgactacaaaaagaagaaaagaagaaaaagaatcaatcattcattgatcgctgaaacgatacgatgacagggaaggcgaacgcaagaagcacacggcgaaggagatcgcggcgaaagtggacgcggcga

SEQ ID NO: 8581 - DNA, 235 bp, Glycine max
  Clone ID: 701101402H1
ctcgagccgcaaagagacacaaagaaaattcttgcacaccaaagaaagattgcaacaactgcacgaaaatggcgacatttggaagaccaacgcatcgagaaacgcagtgcgttgtttgacgcagccttggcatccactagccgtaccccttcgctcccctctcatttctcctccgtccgctacctccgcaccggtcgcgatcccagctcaaggacttatgagataattccgccgg

SEQ ID NO: 8582 - DNA, 231 bp, Glycine max
  Clone ID: 701101403H1
aattaagttagtagcgagagcgggagaaatgaaggttgtttacttcttcgttgtgctattggctttggcatcctccattgcctttgcttatgatccaagccccctgcacgacttttgtgtggctatcaatgataccaaaactggtgtgttcgtgaatggaaaattttgcaaggatccaaagcttgctaaggctgaagatttcttctttcctggattgggacccggcaacac

SEQ ID NO: 8583 - DNA, 156 bp, Glycine max
  Clone ID: 701101404H1
ggaggctagaaagaaaaaaaaaaaagatgaatcagtgtggttatcagcagaagaatgctttgacaagctgtaaggagatgaggatggaatcagtggtgtgccctaaaccacgaagattgggcctgttgaaccactcaaccttttgatgaccacatc

SEQ ID NO: 8584 - DNA, 228 bp, Glycine max
  Clone ID: 701101406H1
ctcgagccgctcgagccgaatcggctcgagattgtcgaatccgtaaggcgaaggagagcaatcaaggagggctatcttaacaatgccaatggtgtgttgcatatgtctgccatgtggcttttcccacaactttgcttgggtggaatagctgaagcattcaatgcaataggccaaaatgagttctattacacagagtttcctaggaccatgtccagtgttgctgcttcc

SEQ ID NO: 8585 - DNA, 230 bp, Glycine max
  Clone ID: 701101407H1
ggaaaaaatggtgtcgctgaaactgcagaagcggctggccgcaagcgtgctcaagtgtggcagaggaaaggtgtggcttgaccccaatgaagtcaacgaaatctccatggccaattctcggcaaaacatcaggaagttggttaaggatgggtttatcatcaggaagccaaccaagattcactcacgctcgcgtgctcgtaggatgaaggaggcaaagaagaagggccggc

SEQ ID NO: 8586 - DNA, 231 bp, Glycine max
  Clone ID: 701101408H1
gttccttttgaaggttagaagtgctacaatacaaacaatggcagctactcaggaagatgtgaagcttttgggtattgtgggaagcccatttgtgtgcagggtccagattgcccttaagttgaagggagttgaatacaaatttttggaagaaaatttgggcaacaagagtgatttgcttctcaaatacaaccctgttcacaagaaggttccagtgtttgttcacaatgagca

SEQ ID NO: 8587 - DNA, 237 bp, Glycine max
  Clone ID: 701101409H1
cctcgagccgattcggctcgagaaacagaggaagagagaaagacccaagatgggcctttgcttacggttgcttcggcgtagacacacgcatgagcaaggacgaagagagattggcctctgaagaagcgcgtgccaaagctgctgaagccgcacagaaaaggcaagagcaatttgagaattctgcagcaggacgagctgctcgtgcacagcaacaagcaatggcaaagcaatctgcaa

SEQ ID NO: 8588 - DNA, 233 bp, Glycine max
  Clone ID: 701101410H1
ctcgagccgagaagatgagcttgttcgctgtgtttaccaataagcagagggaaccgcaaccacaggaggagtcactcgctgctgctaagaagctctcccccgatgtggcggtgttcgtgcagtacttgttcaagcaggggtatttcaacgacgccaatttcgctaaggggaggaagcactttaatcctgattggttctccaatgtcttcgccttaggctatatcaagtttgcc

SEQ ID NO: 8589 - DNA, 231 bp, Glycine max
  Clone ID: 701101411H1
cgagagggtggaacgacatgaggtgctcggcaagtggaggtcaagatttgcaatggccggtttcactccttaccctttaagttcattggtgaatggtaccatcaagaagttgctcgagcactacagtgatagatatagacttcacgagagagatggagctctttatctgggttggatgactagcgatttggttgcttcttgcgcttggaaatgaaagttctgcaataaggc

SEQ ID NO: 8590 - DNA, 232 bp, Glycine max
  Clone ID: 701101412H1
cgagagggtggaacgacatgaggtgctcggcaagtggaggtcaagatttgcaatggccggtttcactccttaccctttaagttcattggtgaatggtaccatcaagaagttgctcgagaactacagtgatagatatagacttcaagagagcgatggagctctttatctgggtacgatgaatagagatttggttgcttcttgcgcttggaaatgaaagttctgcaataaggca

SEQ ID NO: 8591 - DNA, 227 bp, Glycine max
  Clone ID: 701101413H1
gaatcaggccatacacagtcaggggaacgccccttctatgattatcttgagagttgccttcgccacaagtcagacatcgtgatttttgaagctgccagggcaataacagagctcaatggtgtaacaagccgagaattaactccagcgattactgttcttcagctattcttaagttcgactaagccagtcttgagatttgctgctgtccgcaccttgaacaaggtggc

SEQ ID NO: 8592 - DNA, 231 bp, Glycine max
  Clone ID: 701101414H1
ggtcttgagaatggtcctgcagccttggttggcctctatagtggtcgcaatgttggtaaacaagtggttgttgttgctcgtgactgaatgcagatgctttcgttggacattgctgtctttttttatgattttggtgttgaatattcagggctctttgtatgttttttgcaatcattttcaattgtggtatttgtgatagcagtgtaacttaagcaactcttagttgaaacg

SEQ ID NO: 8593 - DNA, 235 bp, Glycine max
  Clone ID: 701101415H1
acccaacacatcaatagtatagcatgtgttttacaaaaaatctccccatcaacctagcattaacaaaatctcctccacggttttgtttctgtcaagactacctcctctaaaaatacatgcacctagcttgtgttgtttgctttgatcccccaataagactatgttgctagaaatgagcttgtggattttctggtagcactgtcgtgcgttgcagccaggaataacaatcaaacca

SEQ ID NO: 8594 - DNA, 237 bp, Glycine max
  Clone ID: 701101416H1
gtggttttaacggcgaaggacgttgccgttgagggcttctgcatgagccgctgtggcacccacggctctacccggaacgttaaaagtaatgcccgaaccgcatatatctgggttggaaactccgaaacacagtgccccgggcaatgcgcgtggccattccaccaaccgatttacgggccccagacgccgccgttagtttctcctaacggcgacgccggggttgacggaatggttatt

SEQ ID NO: 8595 - DNA, 236 bp, Glycine max
  Clone ID: 701101417H1
gcagaagtgaagctgttgagcttttttgcgagtccctttggcaaaagggttgaatgggcattgaaactgaagggtgtggagtatgagtacatagaacaagatatcttcaacaagactagtctccttctccagttgaacccggttcacaagaaggttccggttcttgttcatgcccacaaacccatcgctgagtcattcgtcatcgttgaatacgttgatgaaacatggaagcagta

SEQ ID NO: 8596 - DNA, 234 bp, Glycine max
  Clone ID: 701101418H1
gtttcttcctcgcttttctgcaaaatcatctaaatccgtttctgatcctgaatcatcagtttttcccctgacagatgggaggtggcaaggacaaacacaatgaagaagagaaaggagttttctcacatctggctcatggagtagctcaagctgctcatggttaccctccaggggcataccctccacctcctggggcataccctccttaccaagggtacccacctgctcatggct

SEQ ID NO: 8597 - DNA, 230 bp, Glycine max
  Clone ID: 701101419H1
gggagtcagagaaaccctaggtaagaagaaaagatgccggctggtcatggtttgagatcccgcaccagagattccttctctcgtcctttcaggaagaagggaaccatcgccctcaccacatacctgagaacctaccacgtcggcgactatgttgacgtcaaggttaacggtgccgttcacaagggaatgccccacaaattctaccatggccgcaccggacgcgtctggaa

SEQ ID NO: 8598 - DNA, 229 bp, Glycine max
  Clone ID: 701101420H1
gtgatttggagtttggagcgactgaactaatcattaatttgcactcgctgtttcagcttcatcacccttcttttgcatcatttatatctcttgagaaatggcacaagaaacctttctattcacatctgaatctgtaaacgagggtcaccccgacatgctgttcgaccagatctctgatgcagtacttgatgcgtgccttgaacaggaccctgacagcaaggttgcctgt

SEQ ID NO: 8599 - DNA, 231 bp, Glycine max
  Clone ID: 701101421H1
taatcactataaaaaaaaatctacactatctatccttccacaacacaacacaatccacataccacttaccaaactcactcatcaattctcatctttcttctcactaactattaattcatcatgtcgagcacagctggccaagtcatcaaatgcaaagctgcggtttcatgggaggcagggaagccacttgtgattgaagaagtagaggttgcgccaccacaagctggtgaa

SEQ ID NO: 8600 - DNA, 229 bp, Glycine max
  Clone ID: 701101422H1
cggctcgagaagatgaagagggtgttgccacgcaactggaagcaacaattcgtagtgatgatgggaacacacaacaggggaaggtgcagtttcctacggtttttatagggggtaagttgtttggaggattggataggatcatggctactcatatctctggggaattggttcctatcctcaaaaaagctggggctttatggctatgatgacttgatcttgataccccttt

SEQ ID NO: 8601 - DNA, 228 bp, Glycine max
  Clone ID: 701101423H1
ttcacagagagaatggctgcggaaaacgttgttgagttcacagacttacccgtcaagcggccaagagaagaagaagaaggaaccactggcgtctccaacgacgccgtttcagcgctccccaatgaccctcaataccctggcatctctgcggttattcccggttggttctccgaactcagcccaatgtggcccggggaggcacattccttgaagatggaaaagattttg

SEQ ID NO: 8602 - DNA, 230 bp, Glycine max
  Clone ID: 701101425H1
tttttctttttcaaatcaaaactgagaattcaatctataaataaaacgaaactcaacaacatttatgtcttatccgccaccatataacccccccagagtgtcgaaccatagtaacagtaaaagacaagaaaaggctccaacgtatgaagaacaacctaaatttacattttaaggcatagaagtcaaaataataacctttctaattcaggaaatccaactaccaaagtttt

SEQ ID NO: 8603 - DNA, 233 bp, Glycine max
  Clone ID: 701101427H1
ctcaccgatgaagaggtcgatgagatgattcgtgaggctgatgttgatggagatggccaaataaactacgaggagttcgttaaggtgatgatggccaagtgagtgatcatcacattatggccacaagaacctaaatgaagaagtgttgattaaaaggaaatgaccaaaaacacagaggtaaggggaaggacaagggtttgggctgtataacagtgatgtagtagtccttgtcc

SEQ ID NO: 8604 - DNA, 231 bp, Glycine max
  Clone ID: 701101428H1
ataaacgccgcccaaaaccatttatagggtgttcttttctttgccaagaaaatgagagcgtgcatttcaatccacattggtcaggccggtatccaggtcggaaacacctgctgggaactctattaccttgaacacggcattcagcccgatgggcagatgccgagtgacaagaccgttggaggaggagacgacgccttcaacacattcttcagcgagaccggcgccggaaag

SEQ ID NO: 8605 - DNA, 234 bp, Glycine max
  Clone ID: 701101430H1
gacatcgcgatctggaaccgagtttagctgaacgaaaaagaatcgagttgaaatgggtttctttggtaccattttggggtttttgggatttcgggttgggatttcgattggtctcgtggctggctactttctcttcatctacttccaacccaccaatgttgcggatcctgaactcaagccattggcggagcaagagccagagactctgccacgaatgtctcccgagattcctct

SEQ ID NO: 8606 - DNA, 237 bp, Glycine max
  Clone ID: 701101431H1
accaaatcatactttacatttgcgcatctcttatttaaccacacacctgtgagagtatataggaacatataccattactatggctctgaagttaggacatggcgtgatgatactagttattataagtgcttcaatgttttcagtgagcatggccaacaaggattggtcctttggtttcaactacactgattggtggtctagattcggaaatcatcctcagaacaaaacacagcaaca

SEQ ID NO: 8607 - DNA, 240 bp, Glycine max
  Clone ID: 701101432H1
gcgaaatcatttaagataagagtgcattactactaagaggagaaaaaatgaaagttgtatacttccttgttgctatcttggctttgacatccactgtggtctctgcctatgaccctagtcctctgcaagatttttgtgtggcggccaaagacaaagatggtgtatttgtgaatggaaaattctgcaaagatcccaagcttgtgacagctgaagatttcttcaaacatgtggaacctgcga

SEQ ID NO: 8608 - DNA, 236 bp, Glycine max
  Clone ID: 701101433H1
gtttcattgaatcttcttcatcactgccaaaaacgtcaaaccaaaattttaaaacataaatctccaaccccattttctcacacacactctctttttctcttccaattacaacacaatccgtctgcgattcgccaccgaaaaacctctcaccatggtttctcgccatttggcttcgctcttcctctgtttcctctgtttcgagatctctgtttcatcaattcgattgcccggtttgg

SEQ ID NO: 8609 - DNA, 231 bp, Glycine max
  Clone ID: 701101434H1
tttttgccctaaaaccctcgctgccgtcgtggtggccgcccaagaaaagagaatagagagcgcaaacgactcttcatcttcgactcaccatgaagctcgtcaggtttttaatgaagttgaacaatgaaaccgtgtcaattgagctcaagaatggcactattgttcatggcaccattacaggtgttgatatcagtatgaacacacatttgaaaacagttaaactaactctga

SEQ ID NO: 8610 - DNA, 229 bp, Glycine max
  Clone ID: 701101435H1
ccagtgtataaacctccagttgacaaaccaccggtttacaagcctccagtttataaaccacctgtttacaagcctccagtgtataaacccccaattgacaaaccacccgtttataagccaccagtttacaagccaccagtgtacaagcctccagtgtataagccaccagtgtacaagccaccagtgtacaagccaccagttgagaagccaccagtatacaaagcacccg

SEQ ID NO: 8611 - DNA, 226 bp, Glycine max
  Clone ID: 701101437H1
gggagaagcatgttgttgatgttgggactatgcttcctattgttctctgcatttccacttccgttctctgacagatgccacccacaagacaagaaagcgttgctccaactccagaaggacctcggcaacccttatcacatcatatcctggaacgcaaaggcggattgctgcgagtggttctgctgcgttaagtgtgacgagaaaacaaaccgcgtcattagcgttg

SEQ ID NO: 8612 - DNA, 224 bp, Glycine max
  Clone ID: 701101438H1
gcgttgtgttgcgtcgtgtcgtgcgctgttcctctgtctgtcgtttttgttttcagaccaaaccctagctccgcatcgcaaccatgtcgaccaagcacggtggataagctaagcctttgaagaaacccaagtctgataagaaggattacgacgaggttgacatggctaacattcagaagaccaaggaagaggagaaggcgctaaaggagttgaaagccaaggcg

SEQ ID NO: 8613 - DNA, 228 bp, Glycine max
  Clone ID: 701101439H1
cagcatttggaggcatctgtatcggtgctctgacagtgttggcagacttcatgggggccatcggttcaggaaccggaatattgcttgcagtaacaatcatctatcagtactttgagacatttgagaaggagagagctagtgagcttggcttcttcggtttctaagttctgccaagcaaataatgttggttggtgactccaacgagctctcccacaccccttgtttgag

SEQ ID NO: 8614 - DNA, 229 bp, Glycine max
  Clone ID: 701101440H1
gaaaaatgtgaagatgattttatagataatggcacaaccatagggacaacgactaggagaaagcagggccagaagaggagaagggtgcttctttctgattcagattatgcatcttctggatcatctgattttgagtttaccatatctgaagaagagagagaacaggtgagagaagccaagagattgtgtggaaatttgagaaataacttgaggagttcatcccatctaa

SEQ ID NO: 8615 - DNA, 234 bp, Glycine max
  Clone ID: 701101443H1
ctctttctctttccattgttctactttttcagtcccaccaccaatgcgcactccatgatctacccttcacacccatgaccaccctttccctcttcatcattctattttctctattttccaccccttcccattctcccctcacttgtgcttcccagaagctcaaccacacctacgccaactgcaccaacctccccaccctcggcgccaccctccacttcaccttcaacgccacca

SEQ ID NO: 8616 - DNA, 233 bp, Glycine max
  Clone ID: 701101444H1
caagaatccctccctttctggctttctctctctaaaactatcatgtcctccaccgcggctcccgtccttcccatatccaacccccaaaccaccgccgcaagccggcgcccatcgaggctccggcgaacaacccggccttccgcgccttcatcaacaacctctccgcgtccctcccgacacggcctcgaccagcgccgcccgtggtcggagctcggggaccgctccgcgttctc

SEQ ID NO: 8617 - DNA, 229 bp, Glycine max
  Clone ID: 701101445H1
aaagactttaccgagtccttacgcgttgtttgtgtttgcgtcggaaggaagagaagatgactgagaatttgatggagaaagtgagcgcactgggagagcgcctgaaaatcggaggcgtggaagtggggagaaagatgagcgaggggatgagctccatgagtttcaagctcaaggagttcttccagcctgggcccaatcaggccgacaagcttgtggaggacgctacttc

SEQ ID NO: 8618 - DNA, 233 bp, Glycine max
  Clone ID: 701101446H1
gtgatttggagtttggagcgactgaactaatcattaatttgcactcgctgtttcagcttcatcacccttcttttgcatcatttatatctcttgagaaatggcacaagaaacctttctattcacatctgaatctgtaaacgagggtcaccccgacaagctgtgcgaccagatctctgatgcagtacttgatgcgtgccttgaacaggaccctgacagccaggttgcctgtgaga

SEQ ID NO: 8619 - DNA, 237 bp, Glycine max
  Clone ID: 701101448H1
ggatagaaaaccctaaaggattcaagcttgactttttctttgataccaacccttattttaccaattctgtcttgacaaaaacatatcatatgattgatgaggatgaaccaatattggagaaagcaattgggactgaaattcaatggcacccaggaaaatgtctgacacagaagattcttaagaaaaaacctaagaagggttcgaagaatgctaaaccaattaccaaaactgaaaatt

SEQ ID NO: 8620 - DNA, 222 bp, Glycine max
  Clone ID: 701101449H1
cttctgcatcagggcactgaacttccacacatgagaaaagaccttgcatgttaaagtacaagttattctatggcatgttgtaacggtctaaatgacctgtgtacgtacataactgaggctggagtctatgctcaagatttgtgcaacattataagcttaatagatggccacgatagttatgctggcggatgttcttgagcacgtgtaaatcgacatcaatcg

SEQ ID NO: 8621 - DNA, 220 bp, Glycine max
  Clone ID: 701101450H1
tcgagcaatcccacacgcttcttactcctctcataacttttctgctccccgttgagaaagacttgcatccaaaggaaaaataacgctaatggctccaagagacagccgagccaccgcgctcattgggcccggcccaagcctatcaccggcccacaaagcgatccgctacagaggcgtcaggaaacgcccctggggccgctacgccgccgagatccgcgat

SEQ ID NO: 8622 - DNA, 229 bp, Glycine max
  Clone ID: 701101451H1
aaagaatcaaagacaggggtggtggctgcttcgaaagcttaataatttgttgatttccagaacatcatagttttcgcagcagcaaactaacaaattactcatatcatataataagatggcccgttctctctcgcaagccaaacgtattggtgtccttgttgctcaatctatctccctaattcccgttcatcggcgatgttacgcagtggcatccgatgtatcggtaaga

SEQ ID NO: 8623 - DNA, 224 bp, Glycine max
  Clone ID: 701101452H1
caaatattcagtgaagatcaacctcaatggcatctcttggcgtgcgaccagttcttccccctccattaacttccatctccgacccacctcctcttttcgatggcaccaccaggctgtacatcagttattcttgcccctatgcacaacgtgtgtggatcgctaggcactacacggggctacaagataatatcaatttggtccctattacccttcacgacaggcca

SEQ ID NO: 8624 - DNA, 228 bp, Glycine max
  Clone ID: 701101453H1
gaaaaaccaagtaatactagccaaaatatgtctcccaaatacatgtccctttccctcctagtaatactagggatggcttttctggccactacttcccttgctgatcgtcgttttctttcggtggaagatggtcatgatcaccatcaccaccacccaccaaaaaaacactggcctccaaccacacaaacatgaaccttcaaacgtagaaaacaaggagaacactgaggt

SEQ ID NO: 8625 - DNA, 224 bp, Glycine max
  Clone ID: 701101454H1
tcgagctttctctctctcattctcttctccatcgcgcgtaagaaacacattttagttgctactaatgggaactgttgaagctgcaaacaaggatgcaaatggaagtctcctagagaaaaatccttcagttgtttttgtgttaggtggcccaggaagtggaaagggtacccaatgtgcaaatattgtccaaaattttgggtatactcatctcagcgctggtgatc

SEQ ID NO: 8626 - DNA, 229 bp, Glycine max
  Clone ID: 701101455H1
gtgagaagtgagaagagaaaaatggcaatctccatacccagtagacaacttttcatagatggagagtggaaagtccctcttctcaataatcggtttccgatcatcaaccccgctactgaagacatcatagggcatatcccagccgctactaaggcagatgttgaccttgcggtggatgctgctaaaagagccttttcccataacaaaggcaaagattggtcttcagctc

SEQ ID NO: 8627 - DNA, 231 bp, Glycine max
  Clone ID: 701101456H1
cgctcgagccgctcgagccgctcgagccgctccaagatcacatttctctttgacccttttgctccctgtatctccaattcccctctccacccactttccctttaagtcaatttcatgcttctctgtctcagatcctagatcttgctgtcggtgggttgatcggagtagatgtcgccgtcaaacgcgttgcagaacggcggcggcggcggccgtaatggggtgagttatata

SEQ ID NO: 8628 - DNA, 227 bp, Glycine max
  Clone ID: 701101457H1
gctagctattagttcgattttgtagtaagtgaggtgccaatatggtgaagatagctcttggtactttggatgactcttttagcgctgcctctcttaaggcttatttcgcagagttccacgcaactctgattttcgtgttcgctggtgttggatcagccatcgcttacaacgagcttacaaaagatgcagccttggatccaacggggctggtggcagtagctgtggca

SEQ ID NO: 8629 - DNA, 230 bp, Glycine max
  Clone ID: 701101458H1
gcaaagtgcaaaaaccaaacctcgtcaaaggttttagtttgagtttgattcatcgtagtatctaagcatgactctctcccaatcttgccggaaaacaagccttcgaaaacggtgctatctggttgcaaagcagcagaagacgcgcttctacatcttcggacgctgcatagccatgctcctctgctggcacgaccacactgtttccgattagatccttcactcgcgtttca

SEQ ID NO: 8630 - DNA, 232 bp, Glycine max
  Clone ID: 701101459H1
caagaatccctccctttctggctttctctctctaaaactatcatgtcctccaccgcggctcccgtccttcccatatccaacccccaaaccaccgccgcacgcgaggcgccatcgaggctccggcgaacaacccggccttccgcgccttgctcaacaacctctccgcgtccctccgacacggcctcgaccagcgccgcccgtggtcggagctcggggaccgctccgcgttctc

SEQ ID NO: 8631 - DNA, 222 bp, Glycine max
  Clone ID: 701101460H1
ttcttctcttgcggctagggttttagcgcacttcttctagatttaaggaagatgggtaaggcaaaggttcacatcagtattgtggtcattggccatgtcgactctgggaaatccactaccactggtcacctgatttacaagcttggaggcattgacaagcgtgttattgagaggtttgagaaggaagctgctgagatgaacaagaggtctttcaagtatgcc

SEQ ID NO: 8632 - DNA, 228 bp, Glycine max
  Clone ID: 701101461H1
ggactttaggttgggatttgggaattagggttattcgcgtggcgaagatgattgaggtgctcttgaacgatcgattggggaagaaggtgcgcgtgaagtgcaacgaccgatgataccatcggcgacctgaagaagcttgtggcggctcagactggcacaagagccgacaagatccgcatccagaagtggtacaccatctacaaggatcacatcactctcaaggattac

SEQ ID NO: 8633 - DNA, 234 bp, Glycine max
  Clone ID: 701101462H1
gtccatggccactttcttcacccaaacctccttcccctcccactctctctccaaaaccttcgatacccatttcgccccatccccgaaagtcaacgtatttgcgaacttcccggcgaggaggcacgtgggggttcgagtttcgaacgcgctgatcgaaccagacggcgggaagctggtggagcttgtggtgagggataattcagaaagagacttgaagaagggtgaggctctttc

SEQ ID NO: 8634 - DNA, 236 bp, Glycine max
  Clone ID: 701101463H1
gcatgggcctcctcacactcttgagcgacggcaccgttttgcgttccaacatcaacttccaagaacaacctcaacccacccaacacgacaacctcgtacaattcaaagacttcctcttccacaaaaaattcaacctccacctccgtctctacaaacctaaatttgacgacaacattaatcatgatgacgacaagaacaacaacaataagtcgttgcccgtggtgatgttcctccac

SEQ ID NO: 8635 - DNA, 233 bp, Glycine max
  Clone ID: 701101464H1
tttctctctagagcttaatttctttctctatcaccccttgcttgcactttccatcatattttggatcatttaagtttttgacactaggcgaacattattgtattgaaaacactttcatttgatcttcttcttgttcatagtcttatgaccatagagatattttaataagaagatcggtttgtttctgatatagtttctagtgtttcatcaagtcacgtgcttcttattgtttt

SEQ ID NO: 8636 - DNA, 239 bp, Glycine max
  Clone ID: 701101465H1
ctcgaggagaagtgcagctgttgagcttctttgcgagtccccttggcaaaagggttgaatcggcattgaaactgaagggtgtggagtatgagtatatatgacaagatatcttcaacaagactagtctcctcctccagttgagcccggttcacaagacggttccggttctagttcatgcccacaaacccatcgctgaatcattcgtcatcgttggatacgtcgatgaaacatggcagcag

SEQ ID NO: 8637 - DNA, 224 bp, Glycine max
  Clone ID: 701101467H1
ctcgagccgcctgcttctagtgctcttccttgtcatccaatttggtgtggtgtatgctattcatcatcatcatcatctaagatgcagagaaatttcatgaggctgctgatgttctttctgtgtttctcatatgttctctctgtctctgctattcctgcaacaagaacccaaaatttgaaaggtgaagaagatgatgatttttcagccctgccttctttaactag

SEQ ID NO: 8638 - DNA, 224 bp, Glycine max
  Clone ID: 701101468H1
cctcctttgactttgtggctggtgctgccttttctcgtgttgctagcggcggcaacaacgtctccaatacgcgccacgacggtcgcctcgtcgttccacggtcaacgagagtttgactatttcgctttcgcgttgcaatggcccggtacttactgcaaacgcacccgcagtttctgccccatcatcggttgctgcagaggctccaattttccaacagtgttcac

SEQ ID NO: 8639 - DNA, 223 bp, Glycine max
  Clone ID: 701101469H1
acagaaccgagcttgcagcagcgatttctcatttcatttttcacacttgcacaatggcgaaaaccttcaaatacatcatcctcggtggaggagtttccgctggttatgcggcgagggagtttgccaaacagggcgttaagccatgggagttggctatcatttcgaaagaagcggtagcaccttatgaacgtcctgctctgagcaaggcttacctttttccaga

SEQ ID NO: 8640 - DNA, 225 bp, Glycine max
  Clone ID: 701101470H1
gtgccgccattttgggcagagacccagcagggtatatttgatgcagtattgaagggacttatagattttgactcagatccttggcctctaatatctgacagtgcaaaagatctgattagaaagatgctgtgttctcggccttcagaacggttgactgctcatcaagtgttatgtcatccttggatatgtgaaaatggagttgcccctgacaggtcactggaccct

SEQ ID NO: 8641 - DNA, 223 bp, Glycine max
  Clone ID: 701101471H1
cggctcgagtgataatcaaacaagcgttttgatcaaagttttcgaaggggagcgagcgaagacagaggataacttccttcttgggaagtttgagctttctggtttcactccatcgccaaggggagttccacagatcaatgttgggtttgatgttgatgttgatggcattgtggaagtcactgctagagataggagcacggggctgaagaagaagatcacgatc

SEQ ID NO: 8642 - DNA, 226 bp, Glycine max
  Clone ID: 701101472H1
ctactaacccgacctcccgaacagcagcacaaatctccgcgaggcatctcagcccagaggtttggtcccacgacgctgaacgttcgcccttttccattccttcgtcgacactccggttccggcacgaagaaatcaccatgtcctccttcgagcaggtggtcgtcatcgacggcaagggccatctccttggccgtctggcctccatcgtggccaagcagctcctcaa

SEQ ID NO: 8643 - DNA, 228 bp, Glycine max
  Clone ID: 701101473H1
actcgagccgaatcggctcgagatcgagaagttgattactctgacaactcagttacagaaaataactcgtgcagcttatcctatacagtacattccaaatgcaaagttaccttgtgttggccctcacccaaagaatgtcatacttttggcatgtgacgcatttggtgtactcccacccgttagcaagctaaacctggcacagaccatgtaccatttcatcagtggata

SEQ ID NO: 8644 - DNA, 228 bp, Glycine max
  Clone ID: 701101475H1
gtaatctttgtagtgcagcgctgcagcagtaataccaaccaaaatacactggacggttgtgtacatgttttaagattttgatttttcaattgaataatcaagcttgttttatcaaactcaaaaaaaaaaagaaaaaaaaagggggggccccggactagtgcgctcgtagcccggggatttaattcgggccgggtccggcaaggggtcccagtttccccaaaagggggc

SEQ ID NO: 8645 - DNA, 228 bp, Glycine max
  Clone ID: 701101476H1
cactaacaataatgaagccaccaagactgctgcagagaagaaattcaaaacactgccaccatcagagtctctgcctaagaatgaaaccattggaggctacatctttgtttgcaacaacgataccatggcagagaatctccaaagacagctctttggtctgcctccacggtacagagattcagttagaacaataactccagggttgcccctttttctgtacaactactc

SEQ ID NO: 8646 - DNA, 228 bp, Glycine max
  Clone ID: 701101477H1
caattcaaaccacgccttcccctgttcacaacctagcttgcccacaccaccatcacatcacaaaccattcctctcttgcatttaaacaaaaataaatatagattctgggggcatttcttggattctggttctcgttggtcacatccatcaaacacccctttgattctttcttggcgtgcgtcaggttcaattcatttttatggcaaccctgtcagagtaataagacag

SEQ ID NO: 8647 - DNA, 232 bp, Glycine max
  Clone ID: 701101478H1
aaaaatccgaaatttgtgctccaacacaaaaaaatgaaacctacaatcaccattctcttgttgtctctactacttctcataacttcaccctccttggcaacccgacccgcatccaaccctgatcaagtcaagcacaacaaaaacaacaaccaaggtggtggtgctggtgctggtgctggcgggttctttggccctggaggagggttcagcatacccggttttggaaacgggt

SEQ ID NO: 8648 - DNA, 233 bp, Glycine max
  Clone ID: 701101479H1
gggtggtgtgtgtttatggagttccattgctagtggtcaatggatttttggtgttgattacattcttgcagcatactcaccctgcattgccacattacacttcctctgagtgggactggttgagaggagctttagcaacagtggatagagattatggaatcctgaacaaggtcttccataatattacagacactcatgtagcacatcacttgttctccacaatgccacattat

SEQ ID NO: 8649 - DNA, 113 bp, Glycine max
  Clone ID: 701101481H1
cgagcttctgcaacaaggcacaaaagttatacacaacgtcaaaggaattatgggttaaagtgcaagttaatggagggcattcttgtagcggactgcatggagagtcgcagtgc

SEQ ID NO: 8650 - DNA, 172 bp, Glycine max
  Clone ID: 701101482H1
gctccacgatgcgaaatatatggatccattggaaatccaagtctcctggctattcgacccgtttgacgaagcgagagcattggatgccgccggagcaaaggagtatgtgcatattcgaattcagcagacgactcggaagaagagtctgaccacagtgcaagggctgaagaag

SEQ ID NO: 8651 - DNA, 225 bp, Glycine max
  Clone ID: 701101483H1
ctcttcctctcccagacaaacacatggctttgcccaatcagcaaaccgtcgattaccccagcttcaagctcgtcatcgtcggtgacggtggcacaggaaagacaaccttcgtgaaaaggcatctcactggtgaattcgagaagaaatatgaaccgaccattggtgtggaggttcatccgttggattttttcactaactgcggaaagattcgattctattgttggg

SEQ ID NO: 8652 - DNA, 223 bp, Glycine max
  Clone ID: 701101484H1
ttcacaagcaccttcaaggggaagttgcagaatcaccatgacgaggaaactatattcggcacgttttcgttgattttttggacccttactttgattccgttgcttaagtatgtattcatcctattgagtgctgatgacaacggggaaggtggaacattcgctctttattcgctgctctgtaggcatgccaagtttaatttgctccccaatcaacaagcagctg

SEQ ID NO: 8653 - DNA, 225 bp, Glycine max
  Clone ID: 701101485H1
caaaaaccattcaattcaaagatagtaggctgccaggcaccgcacaccgccaccgcactttctccgatcctcacaattttgcctccggcatgtctccggccgccggagtcagcgtccccctcctgggggattccaaaggaacgccgccgccggcttccgtccccggcgcggtgttcaacgtggccaccagcatagtcggcgccggaatcatgtcgattccggcga

SEQ ID NO: 8654 - DNA, 224 bp, Glycine max
  Clone ID: 701101486H1
cactcccaacccccacccgtagtttctaccaccttcagtcacggcgtaatacactaaccaacccaccatgtcgctgcctgcttgtcccgccgaacaactggcccaacttctcggcgcaaacaccacagacgcctccgccgccgcctcccttatctgaggccagttcgccgccgtggacagcaagttcgtcgacacggccttcgccgtcgacaacacctagctcc

SEQ ID NO: 8655 - DNA, 228 bp, Glycine max
  Clone ID: 701101487H1
cgactaactccaatctccctatccatgtatccctcttcctcttcctcctcctcctcttcctctcagtccatgacccaagctggcctcactcgctacggttccgcccccggttctcttctcaccagcacggttgattctcttattggtggatcccgtcccagtccctacttttccggagagtcttctgagtctccctgcaaagagcaaagatctttccacaaccacccc

SEQ ID NO: 8656 - DNA, 226 bp, Glycine max
  Clone ID: 701101488H1
cggctcgagtctgtggtgagcatggtggagaatggggttaagcccaatcaccctgactatggtgtcgcggaacttataaggacgaagcggcgtcgttttgactgggaagtgaggtttgtttctgtctccaacaaggcgaatcgtgtggctgataggctcgccaacgatgctcggaaattggcttgtgatgatgtttgtgaggagtatcttcatcccccggctaact

SEQ ID NO: 8657 - DNA, 229 bp, Glycine max
  Clone ID: 701101489H1
gcgagagtgaagaaatggcgcaagacttggcattggatttggaggagcttcgccgcctccacagcatcgccaaaagacctcgaaccctctctcttctctcctccgaaattcgtaacctcgaaaagttatcgtcagaggaagcttctgcgcagattccggcgccgatttcgaccggaactaaagtggcgccttcacctgcgctgaagtatgcggcactcgcgtcgttcag

SEQ ID NO: 8658 - DNA, 228 bp, Glycine max
  Clone ID: 701101490H1
aagcaagtgcttctaaatgactatgttaccggttttcccatagaatccgacatagtatattgtcgtaagtaccataacattgaagcttccacaaagttccaatgatatcttgctcaaaaatttgtacttatcttatgatccgtatatagagaatctcatgaacaagcccgaaggccctcccaatagtcgtgcttacactcctggctctccattaataggatatggtgt

SEQ ID NO: 8659 - DNA, 162 bp, Glycine max
  Clone ID: 701101491H1
cttatttattctccgaaaatggttgatttacattggaaatcaaagatgccaagttccgacatgccttccaaaactctaaaactctctctctccgacaacaagtccttaccctctttgcaactacccttccgcaccacagatatctctcacgccgcaccttct

SEQ ID NO: 8660 - DNA, 224 bp, Glycine max
  Clone ID: 701101492H1
atatgcccatctgtctaatcttatccaaaccacccctacttactagaaatcgccactcttgcattgtttcctccttgtactgttgttgtcatcattcttagttttatcagagggctaaaaggggttttcagtgggtctcagtataagtagtggtgctttgtacttgagtggtggtattattggcatgtgtctgttttttttttatctcctaggttatgggtggt

SEQ ID NO: 8661 - DNA, 229 bp, Glycine max
  Clone ID: 701101493H1
gagaattcctgaagtcagttaagaagtcagaatatgtgaacataaagaaccagtggccgagtatatcctcagcacaggctaaaagattcacaaaattcagggaaaggaaagggcttattgagaaagatgtggtgagaactgatagatcgctcgctttctatgaaggcgatgataatccagatgtaaatgttctgcgagatatcctgttgacatattcattctacaactt

SEQ ID NO: 8662 - DNA, 230 bp, Glycine max
  Clone ID: 701101494H1
ctcgagccgggctgctgtggttgcttcggatttgtccaaaaaccaagacgacggcgtcgggataaacgtggcatcagtaatcttctctcccaggggctattattggatggagaaactgaaggcgatgagacatatagtggtgacgttactagtaactgcaccagtgtagatgacaatgaggtgcaagctgtacgcaaccgttcagaggatattttaaactttagagctaa

SEQ ID NO: 8663 - DNA, 232 bp, Glycine max
  Clone ID: 701101495H1
cgctcttgcaattattcctcttctcgcaatccgcactaaaattctagggttccgaaatggacgctgacggaaagatcaagaagggcgccggcggaagatagggcggcggcccaaagatgaagccggtttcaaggtccgtcaaagccggtctccaattccccgtcggaagaattggccgttatctgaagaaaggaaggtacgctcagcgtgtcggtaccggtgctcccgtata

SEQ ID NO: 8664 - DNA, 208 bp, Glycine max
  Clone ID: 701101501H1
ctcgattccgatccgagccggtccaaaaaaagcgacgaaccccgccgccgacgagtcctcctcctccctcatcaccgctgacgacaccgtcttccgctacctctgccccgtccgcaagatcggcagcgtcattggccgcggcggcgacatcgtcaagcagctccgcgccgagaccacagccaagattcgcatcggtgacgcgctaccc

SEQ ID NO: 8665 - DNA, 274 bp, Glycine max
  Clone ID: 701101502H1
caagcttggggtttgactcgaatcgaatcgaagcgattcatcgatcgatcgatggctcttgtaggagttgaactgaagcatgcggcggagggcgtaccggaggcgaattgccccgccaagcccaccaagcagggcgagggcctccgccactactattctctcaacatccacgagcatcagctccttcttcgccaaaagactcataacctcaaccgtctcgaggctcagagaaacgacctcaattctagggtgaggatgctgcgcgaagaattac

SEQ ID NO: 8666 - DNA, 275 bp, Glycine max
  Clone ID: 701101503H1
ctcagaacctggtggagaagattctccgatcgaagatctaccagaacacgtactggaaggagcaatgtttcgggttaacggcggagacgttggtggacaaggccatggagctcgaccacctcggcggcacctacggcggcaaccgcaaacccacgccgttcatgtgcctcgtcatgaagatgctccagattcagcccgagaaagaaatcatcatcgagttcatcaagaacgaggattacaagtacgttaggattctcggtgctttttacttgcgt

SEQ ID NO: 8667 - DNA, 275 bp, Glycine max
  Clone ID: 701101504H1
ctactactactcatcattgtctcaaaaaccttctctctcaacaaacacctacaacaacaacaaaaaaagagaaattttttagaacaatggaggcatcaaagatgaagtttttcttggttttggtgattgccatgttggcgatggtagcaactggggtttcagctgctgaggcacctgccccaggtccttcatccgatgccaccaccttctttgtacccactgctcttgcttctctctttgttcttgcatttggccttctcttctaattaattctc

SEQ ID NO: 8668 - DNA, 271 bp, Glycine max
  Clone ID: 701101505H1
cggctcgagggatgatgctagcagagcactggaagctacaaatatgagcaagttactggatcgacttatttctgttgaatttgctgttaaagatgatgatgataggagaaatggatatagccctgagagaggccgtgatcgtcaccgtgatagaagccgtgatggaatgcgatctcctagtccttatcgtagagaaaggggtagtcctgattatggccgtgggcccagtccatatcagagagagaggggcagccctgactatggccgtgac

SEQ ID NO: 8669 - DNA, 271 bp, Glycine max
  Clone ID: 701101506H1
ccttaattcaacaatggcagataactcaattagcttattttctccatacaacaagatggcccacttcaacctctctcatagggtggtattggctcccatgaccagatgcagagcgctcaatgggactccactggcagcacatgctgaatactacgctcagagatcaacaccgggtggatttctcatcactgaaggcaccttgatctctccaacttcttctgggtttcctcatgttcctggaatatactcagatgaacaggtagaggcatgg

SEQ ID NO: 8670 - DNA, 269 bp, Glycine max
  Clone ID: 701101507H1
cagatccactgctgcagaatccaatttgtgacactaaatctaagttactatgactgcgcagacccaagaggcagttcttgcgcaacacctcgaacagcaaaagatccatgatgatgaacctgtcgtcgaggatgatgatgacgaggaagtggatgatgatgatgacgatgaggatgatgaccatgacgaaggactcgaaggtgatgcatctggtaggtcgaagcagaccagaagtgaaaagaagagtcgcaaggcaatgcttaaacttg

SEQ ID NO: 8671 - DNA, 267 bp, Glycine max
  Clone ID: 701101508H1
tcgagctgacatgaacctcatcactgatgatgatttcagggaatttgttgatggggtgcacagaggttgcacgatcacaattgtgtctgattctcgccacagtggtggcctacttgaagaagctaaggagcagataggagagagcacaaagggagaggaggaacaatctggctctggctttggattttcaagttttctacaccggaccgtggaagatgccatcgagtctcgcggattccatatcccttcagcattgcgccacaacag

SEQ ID NO: 8672 - DNA, 272 bp, Glycine max
  Clone ID: 701101509H1
ctttgctcaacaaactgctgagaacattgctgcgctcctcgctcaccagtctggtttctactatgatatttgggtggatggggaaaagattttgacatcagaaccacctgaagtagttcaggcacgaaatgacaattctcatggtacaaacttcccggattcccccgagcccatctatggaactcagttcttgccaaggaaattcaaaattgctgttactgtgccaactgataactccgtggacattctcacaaatgatattggtgttgttg

SEQ ID NO: 8673 - DNA, 269 bp, Glycine max
  Clone ID: 701101510H1
gttctcaggaaactgaaccattgggaacagcaggtcctctggctcttgccagggataagctgatagatgactctggagaaccctttttttgttctcaacagtgatgttatcagtgagtatccactcaaagaaatgattgaattccatacaaaccatggaggagaggcttccataatggtaaccaaggttgacgagccatcaaagtacggcgtggttgtgatggaagagagcacagggcaggttgataaatttgttgaaaaaccgaaatt

SEQ ID NO: 8674 - DNA, 269 bp, Glycine max
  Clone ID: 701101511H1
cctcgagccgaatcggctcgagttttggagttggtaactgggaagacccctcttgacccagactatggagaaaatgatctaaccaaatgggttcagtccacattagatcagaaaggactggatgaggtgattgatcccactttggatattcaatttagggaagaaatcagtaaggtactcagcgtggggcttcattgcactaactctcttcctataacccgcccttcaatgcgtggtgtggttaaaaagctgaaggaagtaactgacct

SEQ ID NO: 8675 - DNA, 269 bp, Glycine max
  Clone ID: 701101512H1
atttcacccaaatataaatagcaatggaagcatttgccttgacatattgaaggagcagtggagccctgcgctaactatttcaaaggtgttgctctcgatttgttccctgttgacggaccctaatcctgatgatcctttggtccccgaaatagcccacatctacaagacagacagaaacaagtacgagtcaactgccagaagctggacccagaaatatgccatgggttaagtgacctgtggtatgtgtgaggaagagcctttctactccc

SEQ ID NO: 8676 - DNA, 267 bp, Glycine max
  Clone ID: 701101513H1
cttctttttactctctctctgtctctctctacgctttctcgttcgagatccctcaagggatccactaactgaaggagaaatggggttgacattcaccaagcttttcagccggcttttcgccaagcaggaaatgcgaattctgatggtgggtctcgatgcagctggtaagaccaccatcctgtacaagctcaaacttggagagatcgttaccacaattcccaccattgggttcaatgtggagactgtggaatacaagaacattagttt

SEQ ID NO: 8677 - DNA, 268 bp, Glycine max
  Clone ID: 701101514H1
cgttggtattgatattgatggttctttatgtggatgcacaattagaactacacatggtctaccttgtgcgtgtgaacttgctaagtatagtaggacgtggcacccaattcccttgcaagcaattcatgttcattggaggacattaaacttcagtgaccaagaaatgaacaatgaggggctcgagttagcgttgcaacgtgaagtggatgctttgcacaatcaatttcaggaacttgattatgctggaaaaattactttgaaggccaaa

SEQ ID NO: 8678 - DNA, 259 bp, Glycine max
  Clone ID: 701101515H1
ctcaacaacgctgagcgcagaaaggggaaaaggggattagggtttaggaagcagcgacaacaatggatttcacagtggagaagaaggaatcagagaacaacgccgaaaatgctcacccaacaacgctagattcttcttctcaattggcatcggcacttgattccaacaacaaagaaatccaagaacgacaagctcgtgaactcaaagccggacttcaccccctaaagcagcacaagtttgtctcctgttacactcgtcg

SEQ ID NO: 8679 - DNA, 268 bp, Glycine max
  Clone ID: 701101516H1
cggaaccatttatattggcggctcataggcaattaagtgctatgcatccaattttcaagttgttggacccccacatgaggtacaccttggagatcaataccttggctagacagagtttgatccatgctgatggaatcattgaaaattgcttcactcctggtcgctatgccatggagattagttctgctgcttacaagaacttgtggcgctttgacatggatagcctccctgcagatcttatccgcaggggaatggcagtagctgaccc

SEQ ID NO: 8680 - DNA, 267 bp, Glycine max
  Clone ID: 701101517H1
cctttctaccccatgatgtccacaagacgtcttattatggcttttgcaaacagcagctttggcctctctttcattacatgctacctatgttccctgatcatggtgatcggtttgaccgctcgttgtggcaggcttatgtttctgcaaacaaaatatttgcggacaaggttatggaaataatcaatcctgatgacgattttgtttgggttcaagactatcacttgatgggtcttgccgacatttctgaggaagcggtataaatcgggt

SEQ ID NO: 8681 - DNA, 251 bp, Glycine max
  Clone ID: 701101518H1
cgacattacgagcagaggagattccagaagaagagaaaaatcttggtcctcatgatcgtctaattcatgtgtaccatttcaataaagacgcggctcaaaaccaaatgcaaattcaaaactttggggaacctttttttcttgttatacatgaaggtgaaactctagacgaaattaaagtgcgaatacaaaagaaacttcaagttcctgatgatgaattttgcaaggggaatttgcatttctatcatggggcc

SEQ ID NO: 8682 - DNA, 273 bp, Glycine max
  Clone ID: 701101520H1
caattcctcttattcaggaatttggagagtattgatatatcaaggtaggataaaccagtagccaaggaagatatggagttttctatgattttcattgttagcaacattatgctgcttttcagttcagcatttgccaaaactgctagtcctccctctctgagcccaactccagcaccagccccggcaccagacttcgtgaacctcactgagttactcagtgttgctggtccgtttcacaccttccttggataccttgagtccactaaagtgatt

SEQ ID NO: 8683 - DNA, 269 bp, Glycine max
  Clone ID: 701101521H1
ccagcatatgcaatgatcacagatgctgaggaaaagaatctgataactcctggacagacaactttgatagagcctacatcaggcaatatgggtatcagcatggcatttatggccgccatgacgggatataagatggttttgaccatgccctcttacacaagcttggaaagaagggtgaccatgagagcgtttggagctgaattaatcctcactgatccagccaaaggaatgggaggaacagtaaagaaggcttatgaacttttggaaaa

SEQ ID NO: 8684 - DNA, 271 bp, Glycine max
  Clone ID: 701101523H1
cggctatccaacaatctctgttagacaggcctagaaaatctgtttccaaaactatctgcttaatcttttctatagctgctgtcatgatctcatcagcctttgttggttcttatctcatcaaatccacctccttcttcaaccaatcctctcctcaacatctctgtgatcatgcacttgatagggcaacatgtttaacccatgtctcagaagtggtacaaggtccgatcttgacccccacaaaagaccacaaattcaatttgttacagtcatt

SEQ ID NO: 8685 - DNA, 268 bp, Glycine max
  Clone ID: 701101526H1
ctcgagccgcgggtaacaaggacatcatcatggttgaccacatgaagaaaatgaagaacaacgccattgtttgcaacattggtcactttgacaatgagatcgacatgctggggctggagaactaccccggcgtgaagcgcatcaccatcaagccccaaaccgacagatgggtcttccccgagaccaatgtcggcatcattgtcttggccgagggtcgtttgatgaacttgggatgcgccacaggacaccctagttttgtgatgtcctg

SEQ ID NO: 8686 - DNA, 270 bp, Glycine max
  Clone ID: 701101527H1
ctagtctcatagtgtcatactgcaacacaaaacaatgggttcccttatggcaggatgggaccctacccacatagatcctcaatcagccacacttaaaaggaaccgctcactcaccaaggatgaaattgatgcttactggaaatcaaagaagaagatagaggaagaacaccttagagctatttccaacttgtcagagactattcaggctagcaaaagcacagaacctgagaagaagttgcagaagtcaatgaccatgcctgtgacccgtgc

SEQ ID NO: 8687 - DNA, 268 bp, Glycine max
  Clone ID: 701101528H1
cgtgaaagacgaatcaccattgatattgctttgtggaagtttgacacaacaaagtattattgcacagttactgatgcgcctggacatagggatttcattaagaatatgattactgggacatcccaagctgactgtgctgttcttatcattgattcgaccactggtggttttgaagctggtatttccaaggatggacagactcgtgaacatgctctgctttcattcacccttggtgtgaaacagatgatttgctgctgtaacacaatgg

SEQ ID NO: 8688 - DNA, 269 bp, Glycine max
  Clone ID: 701101530H1
cagcaaaataatggaggcttacactaaggttgtttgcattcttggacttttaatttttgtaagcatttcagatattcatagagtggagggtgcaggggaatgtgggaggtctactactccagataatgaagcaataaagcttattccttgtgtctctgccgcaaaagatgaaaatgttaaagttactaagaattgctgtgctcagatcgagaaacttggcaagaaccctagttgtctgtgtgctgttatgctctccaacacagcaaaaa

SEQ ID NO: 8689 - DNA, 222 bp, Glycine max
  Clone ID: 701101531H1
aatcagaatacggatccgggtatggaaggaaggaagaaggtgaatatgggtccgggtatggtgggagaaaggaggattctgaatatggatccgggtatggtagaaaacaagaagatgaatttgggtccgggtatggtggaaggaaggaggagtctgaatatggatctgcgtatggtgggagaaagcaagaatctcactatggatccgggtatggtgtaagga

SEQ ID NO: 8690 - DNA, 272 bp, Glycine max
  Clone ID: 701101532H1
ggctcttgaacctctcaggttttagaagctcagctaagcacaatagagagtttaattaggccattaacatatcatatgggtgtgactaagcctcatgtgcttatgctgttgatcatcatggttgtctcaattgcagagaaaccatcagtaatagaaggaagggctctttccttgatatctggtcaagggtactcaaagatttttgcaacgcttggatttgtatgcaagtgttgtgatggggttggaggtgcctgcactagtacatggacaga

SEQ ID NO: 8691 - DNA, 259 bp, Glycine max
  Clone ID: 701101533H1
tgagcagttggctcggaagtttgaggaagaaacgggacttgagggagttattgtgtgcactcgaagtcctttgaatggaaaactctaccctcttcgcttgcagcttcctccaaacaatgtcaccatgcaggttgttttggttcttccctcgtctaaagtggcaagagaatttgaggagcaaggtatactatgacaagttagattattgtgggagtcttgaattgaatctactgaaatgcaacttgtgattcaagcgtgt

SEQ ID NO: 8692 - DNA, 241 bp, Glycine max
  Clone ID: 701101534H1
ctctttttctctaagtctaaggggtgccctgagatcactttgagcaatggtgaaggctgtggcagttcttggcagcagcgatggtgtcactggaactattttcttcactcaggagtgaaatggtccaaccaccgtaactggatctcttgctggtcttaaggctggtctccatggcttccatgtccatgccttgggggacactaccaatggtggcctgtcaactggagcgcatttcaatcct

SEQ ID NO: 8693 - DNA, 269 bp, Glycine max
  Clone ID: 701101537H1
ctcgagccgattctcataagataactaactcactttgtgtgatagcgttctcattctcatggctattaccggcgatattttccggcagagcataacggaaatgcttgcggagtccccttccggtgcgccagaacttcacgttctcgccgtcgatgacagcctcgttgatcgcaaggtgatcgaacggttgctgaagatttcttcctgcaaagtgacggttgtggagagtggaacgcgcgctcttcagtatcttgggttggagggagaga

SEQ ID NO: 8694 - DNA, 267 bp, Glycine max
  Clone ID: 701101538H1
cagatggtgaggacccatttggtgattcaaggcgaattgcctgcaaaaggtgtggtggctttcatgtctggatacacaccaagaaacaaaagtctcgggcaagatggtgccaggattgccaagattttcatcaagctaaggatggtgatggatgggttgaacaatcttcccaaccatttctttttggcttattgcagaaggttgatgctccttcagcatatgtgtgtgctggtagcaggatatatgatgccaccgaatggtatatct

SEQ ID NO: 8695 - DNA, 256 bp, Glycine max
  Clone ID: 701101539H1
cagatgggcaaattcaatctgtcccatagagttgttttggcaccgctgaccagacagacgtcttacgacaacgtcccacaaccccatgccatcctctactactcccagagaacttccaacggaggccttctcattactgaagccactggcgtctctgacacggctcaaggctatccgcaaacccctggcatatggactaaagaccatgttcaagcttggaaacccattgtcgatgccgtccacgccaaaggggtgt

SEQ ID NO: 8696 - DNA, 265 bp, Glycine max
  Clone ID: 701101540H1
gaacaggatcttgcctttgtcacccaagccaacaaatcaagatgcatatttgctcgctccaaatatgttgaggtttgacgatgtcactgccactatcctcactattattttcggttctgaagaaccctctggtgaaattcttgctggttacaccttgtggcatcgcaaagttgatgatgtggactatcccatggacccaacttgcacctcgctcttaccaaatagaaggttcagtgtctcgggcctaattccaggtacagaatac

SEQ ID NO: 8697 - DNA, 267 bp, Glycine max
  Clone ID: 701101542H1
cgttggagctatagctgctgggaatgctgtggttctaaaaccatcagaaattgctcctgcctcatcatcattattattaaaattgatagagaagtattgtgataactcatttataagagttgtggagggggcagttgatgaaacaaccgcactattgcagcaaaagtgggacaagattttctacacaggcaatggaaaagtgggaagaatagtgatgactgctgctgcaaaacaccttacaccagttgtgctggagcttggaggaaa

SEQ ID NO: 8698 - DNA, 265 bp, Glycine max
  Clone ID: 701101543H1
ggccagttggggtccttatgtgatactttaggtaataatgagcattatagaatttttatggaaatgcattttaaggaaacaagttgagaaaggcttggctgttatacttggtatcatgtctgtagcaattcttttagctgaggcaactcttctgcctagcattgatctatcgcttttttccattcttataaaatcggttggaacacaggaggtccttgtgcaggtgtttgcttttgttcctctcatgtacatgtgcatctgcaca

SEQ ID NO: 8699 - DNA, 109 bp, Glycine max
  Clone ID: 701101545H1
caaactgttaagtgttaacaaacattgctaaaactaaatgttatagttctgattctgatttctcactagtaaaattgaggatcggcattcagcaatgatgaattccaca

SEQ ID NO: 8700 - DNA, 267 bp, Glycine max
  Clone ID: 701101546H1
ctcgagccgtccttagaagacagcggctattgggattttctcgattactctttcattgatcacagcgccccctgatttcctttggtccaataatactattagtgtgaacaccgaagttgacattccaggtgatgctgctgcgtgtcaagagaacaccaagaagaggggacatgctgattcaagctgccaggtgggatctaaagcttgccgtgagaagttgcggagggagagactcaatgaaaggttctgtgacttgagctctgtttt

SEQ ID NO: 8701 - DNA, 268 bp, Glycine max
  Clone ID: 701101548H1
atgtcctgtctggtggtcatggactcatggtgcaaggatatgatccagttataaaagttcttgcaaaagatattgacatacgcttgaaccacagggtgaaaaagatatctagtggttacaacaaggtaatggtgacggtcgaggatggcaggaactttgttgctgatgctgctatcataactgttcctattggaatcctaaaagcgaatttgattgaatttgaaccaaaacttcctgattggaaggtttcagcaatttcagatcttgg

SEQ ID NO: 8702 - DNA, 268 bp, Glycine max
  Clone ID: 701101549H1
caatgatcacattcaaacccacaccaacaacagcaccagcaacatggttcgaaacccgaagaaacggtcaagagcttctaggcgtgcacctaccactgtgctaaccacagacaccaccaatttccgagccatggttcaggaatttactggcatcccagcacaacccctcacatcctcgtctttcccgagaaccaggttggatctctttgcttccgccgcaacaccaactttgatgagatccaacgttaacgttaaccctttggaccct

SEQ ID NO: 8703 - DNA, 273 bp, Glycine max
  Clone ID: 701101551H1
cttgttttgtcatctaagacaacccagtgagagtaagcacacattgctcagcaacaatggcagcctactcaagccatgctttgaaaaccatccctttttcttcctttgtgaagcctgtcagtaccaaaccaacatcattcttcacaccttcacctaccaaacctttcttacccttcacctcaccaaaccactctctcaccaaaaatctcaagctgaactccactttgccacacttttgcttgtcttcagttcccaagaaatctttcacttgta

SEQ ID NO: 8704 - DNA, 269 bp, Glycine max
  Clone ID: 701101552H1
caacaattgggcctgatgtcgagtccaaacagataggtaaggcccaagggttttacctatccgcaacccaaaggcccggtttggagttggagatagtcatggggatggccttgaccttcttagaaggcgaatttaacggtagcagtttaaacgtgttggggagaaacaaaatcttcaatgaggtgagggagttgcctattattggtggcacgggtgagtttcgcttcgcacgtggctatatcctagctaggagtgtcaaggtcgattac

SEQ ID NO: 8705 - DNA, 269 bp, Glycine max
  Clone ID: 701101553H1
ccacttttcagttcccactccctttctctctccccaacccaaaaatggcatcaaaattgaccctcattgcgttggttctcgcggtggccctgtgcgccgttgatctaacccatagcgcatcagcatcctcccctcacgcgccaggccctccgtggactgcaccaacctcgtcctcaccatggccgactgcttgtccttcgtcaccaacggtagcaccgtcaccaagccagagggcacatgctgctccggtttgaaatctgttctcaaaa

SEQ ID NO: 8706 - DNA, 269 bp, Glycine max
  Clone ID: 701101554H1
cattgtttaaacctaattctcatttcttcatcgttcgattcttctcctcctaaagatgcagatcttcgtgaaaactttgaccggtaagaccatcacccttgaggtggagtcctccgacaccatcgataacgtgaaagctaagattcaagacaaggaagggatcccacctgaccagcagagacttatctttgcgggtaaacagcttgaggatggtcgaacccttgccgactacaacatccaaaaggaatccactctccacctcgtgcttc

SEQ ID NO: 8707 - DNA, 270 bp, Glycine max
  Clone ID: 701101555H1
gcaatatgccgtgacgcagtcgacgaagcgatgaggattcaggagctcattaagaaaccactcacttcagttcctcaacgtgacattcacctagacggtcgtgaaccttcacttctcgcaggggaaacctttagtcacgcagtccgaaccatcgacctgaaaaaattgatccatggagaagatatagaacttgagtgaggtgaattgacctcagcttggagggattggggtttctttcagttggtggagcatggaataagctcagtagtg

SEQ ID NO: 8708 - DNA, 267 bp, Glycine max
  Clone ID: 701101556H1
attcaaatcagtttcctcaaaatcgcacccactttgcttcgcatcacaattcgaaagaaactggtttcgatggtgcgagctccggatccgcagcatcgggaatcgaacacgcccttagttcttgaagcccacagaatggggaatcaagcaccccattggtggtaaatcaggtacagggagagggtttgacaaatgatgggcttattcctcagatattttcatctatgccagctctcaatgaagctgcttcttatcttgcacaaacaa

SEQ ID NO: 8709 - DNA, 265 bp, Glycine max
  Clone ID: 701101558H1
ctcgttaattccgcgaacgagcttctgcccttcaaattaaccatggagaatattggtgaggagtacggctactggccggagaacgacatgcttttccaaaacgaagaccttggcagctgggcgataatggatgaggcagcgttatcagggtcagggtactatgattcaagctccccggacggtactggtgcttcttcatcggtggcatctaagaacattgtctccgagaggaatagaaggaagaagctcaacgataggctttttg

SEQ ID NO: 8710 - DNA, 266 bp, Glycine max
  Clone ID: 701101559H1
caaagctcctcctgttattgcttggtggtccgaggaggttcagacgaagaagaagatgagctaggagacattaatattaactcttcaattttgtagtccaattgatccatccatggtgggggaatcaagaaagtgggtgatacttttggcatcaatatgggtgcaggcattcacagggacaaactttgacttctcatcatactcatctgagctcaaatctgtgcttgacataactcagcttcagctcaattacctctctgtggcct

SEQ ID NO: 8711 - DNA, 266 bp, Glycine max
  Clone ID: 701101560H1
ccaacggcatcctcgtctcatacgcctacaccggcggcctgcggttgccgcccaacgtctccgactcggctaagcagccgtaccggttcgagtcgacggtgacggttctcaacaacggcctcgacgagctcaagtcgtggaaggtcttcgttgggttcgaccacgacgagttgttggtctccgcctccaatgctgtgctcgccgacggcaccaccctccccgccgccgtcggaaacggcaccgtcttcgccggtttccccatgact

SEQ ID NO: 8712 - DNA, 264 bp, Glycine max
  Clone ID: 701101561H1
gttccgagaacaacaagcgccttatccatttctccacttgcgaagtgtacgggaaaacgattggagcctttctccctaaagatagtcctcttcgcaaggatccggcatactatgttcttaaagaagacgaatctccttgcatttttggttctatcgagaagcagaggtggtcttatgcatgtgcaaaacagttgattgacaggctgatttttgctgagggtgctgaaaatggcttggagttcacaattgtaaggccatttaact

SEQ ID NO: 8713 - DNA, 264 bp, Glycine max
  Clone ID: 701101562H1
aattgctttgctgtaagtttctgattcctttcttcagaattccaagttttcatttcgttagggacaaaagattgtgagatagagtatggctggaaaaggcgagggtcctgctatcggaatcgatttgggaacgacgtactcttgcgtcggcgtgtggcaacacgatcgtgttgaaatcatagccaacgatcagggtaatagaactaccccatcctacgtggctttcaccgatacagaacggttgatcggcgatgcggcgaagaa

SEQ ID NO: 8714 - DNA, 268 bp, Glycine max
  Clone ID: 701101564H1
atgctctgtagctggtcctgggtttgtgaatattgtcttgtcgaagaagtggatagcgcagaggttagagatgttgctgattgatggtattgataagtgggcacctcgacttcccgtgaagacagttctggttgatttttcctcacctaacatagcagtcgaaatgcatgttggacacctgagatctaccattattggggacacattagctcgcatgtttgaattttcacgtgtggaaactcttatccgcagaaatcatcttggtgac

SEQ ID NO: 8715 - DNA, 244 bp, Glycine max
  Clone ID: 701101565H1
ctcatggtgatgctggtctcactggaagaaagatcatcattgatacctatggtgggtggggtgctcatggtggaggtgccttttcagggaaggaccctaccaaggttgacagaagtggtgcctatatcgtgaggcaggctgcaaagagtgttgtggcaaatggccttgccagaaggtgcattgtccaagtttcctatgccattggtgtccctgagcccttgtcagtgttggtggacacttatgg

SEQ ID NO: 8716 - DNA, 260 bp, Glycine max
  Clone ID: 701101566H1
ctcacttttcatccttcgatcatacacttagttgcttccaattaagatggttctgctagagaagctctgggatgatgttgtggctggccctcaacctgagcgtggccttggcaagctcagaaaactcaccaccctcaaaactattgatgaaggagaaagtagcaagctgcagaagacgttgtcgatgccgtcgacaccaacaaccccgatgactccgacgactcgaacgacaccgggatcggcccgtaaagctgacaacg

SEQ ID NO: 8717 - DNA, 270 bp, Glycine max
  Clone ID: 701101567H1
gcaaaagagcatactgtgaagtgtgactggagaactgttcccacatctgacgcagataatttagcacgagacacaatgattgacactgtgagtgcctatgaacttatcgagcacccagattactcctgtcgttttggtgatattgtgttcaaggttgctcaaaaacttggttatgaagctgatagagataatgcaaagtcagtggactgacttgaatgtggaagttcctctgataaactgggaccaaatcagttatccgaataagtctgt

SEQ ID NO: 8718 - DNA, 270 bp, Glycine max
  Clone ID: 701101568H1
cgagaaaaatgctccatggttatcggtgccgcaatttggggactgggatcagaagggccaagtgccggactactcacttgatttctcaaagatccgggaaactaggaagcagaacaagacaaatatttccagggcaagccttggcaatgaagaagaattcatggattcaacaacctccagcagcgtcaacactgcccacagcagtgagcaccctcaaccccactaccatcaaacccactctccaactgcaaggaagagcttcctcagcta

SEQ ID NO: 8719 - DNA, 265 bp, Glycine max
  Clone ID: 701101569H1
cacacaacagccatggagttttcaggaggccacgaaacaggataatttttcctcaggaaagggtatgatgaaaactgaaaactcttcttccatgcagagtttttcccctgagattgctagtgtccaaactaaccatagcaatgggtttcaatccgatcatggcacttaccccccacaatctcagactttaagtagaaggtcagatgatgggtacaattggaggaaatatggtcaaaacccagtgaagggaagtgaaaatccaaga

SEQ ID NO: 8720 - DNA, 266 bp, Glycine max
  Clone ID: 701101570H1
gacaatcctattaagaggtggtacaaaagcagcaagtacttcctgcaggataattggcagagaacttgggtattgctactgtggattggcgtgatgttaggtctatttgcctacaaatttgtgcagtatagaagacaacctgcatatgaggtgatgggccattgtgtatgcatggccaaaggtgcagccgaaacacttaaattgaacatggctattatcttgctaccggtttgccgaaacaccatcacttggctaaggaataagac

SEQ ID NO: 8721 - DNA, 262 bp, Glycine max
  Clone ID: 701101571H1
attgccttcaaatcacacactctcttcaatttctagggttttgctattgctttgcctccgttccccctttctcacaaaaacaacgccttttctcttctccttcgtatctattctttgcgtttcgtctttggttgattgatggcattcacagcgtaattcgttgctgcattttaatcgatttatctaaccaggactgaatgacctaatggtgcctaaaggtgggaaacagaagtctagtagtagtagtagtaaatcaattttt

SEQ ID NO: 8722 - DNA, 267 bp, Glycine max
  Clone ID: 701101572H1
cctaaacctaaacctaaacctaaacataaactgaatttcccaaatccccttcccaattttcaccaaaacctaatactcccaaaccaatcttcgatcatggccgccgaatcagaacctcaactactcgaagagagaagagaggagcaagaacttaagtacctggaatttgtgcaattcgcgaccatccaggccctgatgcgctgcgccatcctctactcctacgccaaggagcgcgcgggtcctctgaagcccggcgtcaacaccgtc

SEQ ID NO: 8723 - DNA, 267 bp, Glycine max
  Clone ID: 701101573H1
gaacagtgaagagtgagagagagagagagagagaggcccttggaatccaaaaatgagagaaatcatcagcattcacataggtcaggccgggatccaggttggcaactcctgctgggaactctactgcctggaacatggcatccagcccgatggcatgatgccaagtgactcctccttcggtgtagcccacgacgccttcaacaccttcttcagcgaaaccggatccggcaagcacgtccctcgcgccgtcttcgtcgatctcgagcc

SEQ ID NO: 8724 - DNA, 264 bp, Glycine max
  Clone ID: 701101574H1
ctgatggtgtgagccacacagttcccatatatgaagggtatgctcttcctcatgcaattcttcggttggaccttgctggccgtgatttaacggagtacttggtgaaaatccttactgagagaggatactccttcagcacctctgctgaaaaggaaattgtccgtgatgtgaaggagaaattggcatatgtggcccttgattttgaacaagaaatggagactactaagagtagttctgcagtggaaaagagctatgaattgcctg

SEQ ID NO: 8725 - DNA, 266 bp, Glycine max
  Clone ID: 701101575H1
cctcgagccgcttccgcaaatcgcttctcacgacagcatctccgcttctccaacctccgcttcaccttccgtcttcaatcacctcgttcgtgctcccgaagatcctatcctcggggtaactgtcgcttataacaaagatccaagtccagttaagctcaacttgggagttggtgcttaccgaactgaggaaggaaaacctcttgttttgaatgtagtgaggcgagttgaacagcaactcataaatgacgtgtcacgcaacaaggatt

SEQ ID NO: 8726 - DNA, 265 bp, Glycine max
  Clone ID: 701101576H1
cggctcgagccggcgtgtccctcgcggaggctccgggattcctcaaggcccccggcggcgccccccgcaacgttgccatcgccgtcgcgagactcggcgccaaagcggcgttcgtcgggaagctcggcgacgacgagttcgggcacatgctggcccgaatcctgaaggagaacgacgtgcgatccgacgggatcaacttcgaaaagggcgcgcgcaccgcgctggcgttcgtgaccctacgcgccgacggggagcgtgagttcat

SEQ ID NO: 8727 - DNA, 264 bp, Glycine max
  Clone ID: 701101577H1
ctcgagccgcgatcttgttattgtaaaatataataacttttttatatcgtgatcaagattcgccgagggagagccaccgccgccgtcgtggatccgacggcggagcaggcgaaggagactctgttccgcggcgtcaggaagcggccgtgggggcgattcgcggcggagattcgagatccgtggaagaagcatcgcgtgtggctggggacgttcgattccgccgaggatgccgcgcgggcttacgacaaggctgcccgatccttc

SEQ ID NO: 8728 - DNA, 262 bp, Glycine max
  Clone ID: 701101578H1
cttcattttgactctctctctctctctgattgcttccttttcccttttattttgctctcttctctgcacaacaattccttctcattccagatattccaaccatcgacctatctcaattctcaaccttaacctctcagaatgtcttacgcttatctcttcaaatacatcatcatcggtgacaccggagttgggaagtcttgtcttctacttcaattcacagacaagcgctttcagcccgtccatgacttgaccatcggtgttg

SEQ ID NO: 8729 - DNA, 168 bp, Glycine max
  Clone ID: 701101580H1
tacgctgtcgattcggctcgattgactggattcctggggagagttgagtctgacacagagctacccctcttgcaagtcatacaataataatcgcgaagctacgtatgaaacatagatcacaattcacacacatgcggtgacggtagtagtggtagtgcagcagagaag

SEQ ID NO: 8730 - DNA, 264 bp, Glycine max
  Clone ID: 701101581H1
caagtttggaaactctactttcctcattgactcaattccagtggcagagtttcaaggtcgaccactagccgatcaccctgctgtgaaaaatggacgtccacctggtgctctcaccatagcccgcgatcttcttgatgcatcaactgttgcggaagccatcagtgtcatctcctgttggtatgaggacaagactgagtggggaaatcgcgttggatggatctatggatctgtgacagaggatgtggtcactgggtataggatgca

SEQ ID NO: 8731 - DNA, 266 bp, Glycine max
  Clone ID: 701101582H1
ctttattttaaaaatcacttaagaaaaaacgcacactttgccaactaaaacagtaaaacctccccaacaacacgcataaattgacagaaaactacggcaccagaaggttctgattctgaattctgagctttctagttttcctatcatccaatctctttagttagctcctgctcctctttctgccagaagcttcaaggaaaaacaaagaaatgagacttggatgtgcttcttggagattcatcctatgcaccctagttgtcttgttg

SEQ ID NO: 8732 - DNA, 267 bp, Glycine max
  Clone ID: 701101583H1
ctcaccctctctgggctctccctctgctgctccaccgtctccgccgccgcctctgccaccggtggtggttagcccttgtgctgcctgcaagatcctccgccgtaggtgtgtggagaagtgtgtgttggctccatatttccctcccactgatcctctcaagttcaccattgctcatagagtctttggagccagcaacatcatcaagttcttgcaggaactgccagaatcccagagagaagatgctgtgagcagcatggtttatgaggc

SEQ ID NO: 8733 - DNA, 264 bp, Glycine max
  Clone ID: 701101584H1
gtctgatatatctgattttgaatttgacccttgcggatattcaatgaatggcctagaagggagtgctatatccaccatccatgtcactcctgaagatgggttcagttacgcaagttttgaagctgttggttatgactttaatgacatggctctaggtgaacttgtggaaaggactttagcttgcttttgtccagcagagttttctgttgctttgcacattgacatgcatggtgagaaacttaatagatttcccttagacatcaa

SEQ ID NO: 8734 - DNA, 264 bp, Glycine max
  Clone ID: 701101585H1
ctttcattcgtgaaggattccagtttgattatgtctttgattggaccattttgaactatcagcaatctcaaattgccacacctcctgctcgtgctattggtcctgctgctggaccaagttctgggctgccaccagctgttgtaaatgctgatagacagacaggtggggaaaacagtaggcatactggttggtcttcatctgatcctgctcgaagaagaaactctggacctattgcaaatgatggaatgttgtcaagacaaaaag

SEQ ID NO: 8735 - DNA, 266 bp, Glycine max
  Clone ID: 701101586H1
tggtggtggacgcgattctggcatgagttctgagactatcaattcctccactcaaagaacttcaatgagcaacgagagcgtttgcagcaccagcttcagccgtctctccttcgatctccctcctccttcttcttcccctgagacccgcttcgtcaaaccccaccgctcctccgacttcgcctactccgccatcctccgccgcaagtccgccctcaccttccgcgacttccacctcctccgccgcattggcgccggcgacatcggca

SEQ ID NO: 8736 - DNA, 266 bp, Glycine max
  Clone ID: 701101587H1
cgccgactcggttgctatcagcgagtgagagtgagtgagtggttctcttgcagcaacaaggtttagtgacaccaaacagacgggaaatgggtcgtggggtcagtgctggtggtggacagagttccttggattatctctttggcagtggggtacctgccagcagtgcaaatggtgctcgcactcaaaatgcaagtgctccttcaccaccggttgataagcaaagtccagcaccagcaccagcaccagcacctgcacctgcagcagca

SEQ ID NO: 8737 - DNA, 267 bp, Glycine max
  Clone ID: 701101588H1
ctcaccccagtttcactttctcattattttctctcctattgataaagaaacagagagagagagaaaaaaatgcctgcggtaggaggtattagcaacggagggggcaaggagtaccctggaagcctcactccttttgtgacggtaacatgtatagttgccgccatgggtgggttaatcttcggttacgatatcggaatttcaggtggggtgacatccatggatccgtttctgctcaagtttttcccgtcggtgttccggaagaagaat

SEQ ID NO: 8738 - DNA, 261 bp, Glycine max
  Clone ID: 701101589H1
gaataaaactacaaaaacaaaaacaaaagcccacatgcatgccaattcctcctcgttacttttacctgcaaaagtgccaagtccttgcatcagttctctattgttttggcctcaaagttcagatcatgctttccttttcatttaagaatatctcagaatttgagtacactgctaatgtccagatggaattggagtaaaatgtggataacaaacactttaaatagaagttactgacatttgttgttccaaaaaagagagaaa

SEQ ID NO: 8739 - DNA, 263 bp, Glycine max
  Clone ID: 701101590H1
cacccttacaacgcaacaacataacgttgctaattgcttgcacttcctcttatggttgcttcctttgtttctcattagctgttttggtttttgtcttagttctacacctttcctcatttccgcagtagcaacctgcgaaccaatctctctgagaaaaaaaaaaatggcgtcgaacgggaatggcagcgttgcgaacgggaacgggaccgctaggaacggactggcgaagattcagacgcacaagaggcataacggaatttgtc

SEQ ID NO: 8740 - DNA, 265 bp, Glycine max
  Clone ID: 701101591H1
ccaaaatataccactcttcaattcacaaaaaaacacacaaacctcttcagttcacaaaccacacaacctcttctaatattcgttttctgatctacgcaaggttaaggttaatttgcttctatctacatggacattaacgagatcgatgttccttcattctttctctgccccatttcgttagaaatcatgaaggatccagtgacggtctcaacaggcatcacctacgaccgtgaaagcatcgaaacatggctgttctcgaagaaaa

SEQ ID NO: 8741 - DNA, 251 bp, Glycine max
  Clone ID: 701101592H1
cggatcttgacatggttgatgctgccatagtagaagggaaaacaaaagtgctttacttcgaatctgtttccaaccccacccttacggttgcgaacatacctgaactgtgccacatggcacaccggaagggagtgacggtggtggtggacaacacgttcgcgcccatggtgctttcgccagcgcgtcttggtgctgatgttgtcgttcacagtatctccaagttcatcagcggtggggccgatatcattgca

SEQ ID NO: 8742 - DNA, 262 bp, Glycine max
  Clone ID: 701101593H1
gtaccctacacttagttgttgtgttgctgtgcacccggtgagcggtgacctcttccgctttgatcttcttctgtccagggtaaccaatctggttacttgggtcaaagatttctggcatctctgtcatggcaactagacttcagtttgagaataattgtgaagttggagtcttctcaaaacttaccaatgcctattgtttggttgctattggaggttccgaaaacttctacagtgcatttgaggctgagttagcagatgttat

SEQ ID NO: 8743 - DNA, 266 bp, Glycine max
  Clone ID: 701101595H1
cgcatttggagggccagcagaaagtaatgctgcaaactatggtgtggatggaaatgcagcggagagtgatcatgggagcaataatggacaggatggaagcaacaccttgacaatcagaatgataaatatggaaatggcaatgtggctgctgggagcattggaattggtggcattgataggaaaagctttgggaatggggcagatgaaggacggcttgcattgagagaggctgccttgaccaaatttcgtctaaagagaaaagaaag

SEQ ID NO: 8744 - DNA, 268 bp, Glycine max
  Clone ID: 701101596H1
cggatgcaagagagaaacttttggatgctattgaagatttgaagctggattcgctggttatgggaagcaggggcctcagcacaatccaaaggattatattgggaagtgtaagcaactttgtgatgacccatgcctcttgccctgtgactatcgtcaaggaaactagcaaggaaactagcagcagcaagtaaagatgatcaatttgggagagaacatttaaatttcacatattattttttttcttgcattgtacctgatctagttgggc

SEQ ID NO: 8745 - DNA, 273 bp, Glycine max
  Clone ID: 701101601H1
gtagcagtaggaagaggatgatcggcgtcggaaagatcaagcagtacagtaacgtcctcgacaagcccctcaccaagggcaagcaagaggttagtttgagcgcattcgcgttcttgttctcggagcttgttcagtacaaccaaacgcaggtcgacaatattggcgagcttgaacgaagactggaggatgctggatatgcggttggggctcgagttcttgagctgctttgccacagagataagggaaacagaagggagacacggctgttgggta

SEQ ID NO: 8746 - DNA, 273 bp, Glycine max
  Clone ID: 701101602H1
acaatatccagaaggaatctaccctccacttggtgctccgtcttcgtggtgggatgcaaatctttgtcaagaccttgactggaaagacaattacccttgaggtggagagttctgacaccattgacaatgtcaaggctaagattcaagacaaagagggtatcccaccagaccaacagaggctgatctttgctggaaagcagcttgaggatggccgtacccttgccgattacaacattcagaaagagtccaccctccacctggtgctccgtcttc

SEQ ID NO: 8747 - DNA, 271 bp, Glycine max
  Clone ID: 701101603H1
cttcctacgctccagtcccacctccccagcccaaacctcttgtcgattggtccaccggcctctgtgactgcttctccgaatgtggaaactgttgcatgacgtgttggtgtccatgtgttacctttggccgagttgcagaaattgttgacaagggatccacatcatgtggtgctagtggggctctgtatacgctgatttgctgtgtcattggctgtggctgcctatactcttgcttctaccgccccaagatgagacgacagtatggtctaaa

SEQ ID NO: 8748 - DNA, 270 bp, Glycine max
  Clone ID: 701101604H1
actcgagccgaatcggctcgagtggttttcgttgcttcctttcctcgttgcgacgccaatggcttctacgggcgaaaaaccaatggatgtcgaagatgcagagaatgaagtttcagtttcatctgctattctcaattcgatagcatctcggcagaatgaagttctttctccagaagatcttgcttgggttgaatcctgcctagttaaagattctgatatttcagacactgattggcatcctttgaaaaatgctttattagatattatcag

SEQ ID NO: 8749 - DNA, 272 bp, Glycine max
  Clone ID: 701101605H1
accgccgccacattcacaccacgcgccgccgcttccaatttccccggagacccaccctttgcatggcagtgagctttctggcgcgcgatgtatcggacctctgccttgggaagccgccgctgaggtcgctctccgccgccgccaccgtcgccgacgccttggccgcgctcaagagctccgaccacgagacccacgtcagcttgtggagcttctgcgagaacaagaacgaggttcgttgcgttgggaaactgtgcatggtcgatgttatttgc

SEQ ID NO: 8750 - DNA, 272 bp, Glycine max
  Clone ID: 701101606H1
tgttgcagcaacacgaactctccagatgagttttgttttaggagttggattgtcttttgcagttggatttggattgtactttggagctggaatcttctccaaaagtgttcttgttgtgcacttaatcagaataggcctcccgtttgttgctgccacacaaccaatcaattcattagcctttgtctttgatggtgtgaactatggggcatctgattttgcatattctgcatactccttggtcaccgtgtcattggcaagtgttgcttcattgt

SEQ ID NO: 8751 - DNA, 276 bp, Glycine max
  Clone ID: 701101607H1
gcgtcatgggcagctccaccgcctaccccgccaccaaacgcggccttaaaacccttctcctggaacagttcgacttcctccaccactgtggctcctcccacggcgaatcccgcaccatccgcctcacctatccccaccactactactaccctttagtcatggactcttaccgcctctggcaagaggcgcaggcccaagtcggctaccagatctacttcaaggcccatcacatggacatggcccatcacaacgagcccgccatgcgcgccctcatcg

SEQ ID NO: 8752 - DNA, 277 bp, Glycine max
  Clone ID: 701101608H1
aaaaagtagtttgctttaagagagcatgtgagtagttgggataaggaagccatctttgaaacctttgacattttgaaattttgataaaacgttacatcgttgcaacttcctagatgggttaattgaaagatgtagtgggcaaagtgtctgtgtccaaagattgtatcagccaactagatgttgctagctaatgcaagatttgttagctgatatatagcactttgaagaacttttcagttagcagtcacccgtggaaggcttgggttatcaaacaagt

SEQ ID NO: 8753 - DNA, 133 bp, Glycine max
  Clone ID: 701101615H1
caaacccatcattccccgccgcggcctcgtcgtcggcaactactgccatgacgtcctccaccgcgacggcgatgccgtcgccgagaccctcggctgcgctgcctccttcatctccgtcatcctcgacgccctc

SEQ ID NO: 8754 - DNA, 279 bp, Glycine max
  Clone ID: 701101616H1
gacgccataagtaagagcaagtcgaaaagttcctctctctctcacacacacacatcccagccatgagcctcttcggtataggcagaaaccagagaacattccgcccgaaaaaaagtactccttctggaagtaagggagctcaacttcgaaaacatattgatgccacgttaggtagtggaaatctgagggaagcagtaaagctacctcctggggaggatttaaatgagtggctagctgtcaacactgttgatttcttcaatcaggtgaatctgctttatg

SEQ ID NO: 8755 - DNA, 274 bp, Glycine max
  Clone ID: 701101617H1
tctggaacaatggcttgaagtggaagctcataactttcacccaccactctacaacttggttattaatgttctgtttgcgccattaacgggggctccttcggaccaaaaagtgatagaagaaagtgataaaaagattgagaaggtgctggatgtttatgaggagaggctgtcaaagagcaagtacttggctggtgacttcttcagccttgctgatcttagccacctcccatttggtcactatttggtgaaccaaaccgggagaggaaatttggtc

SEQ ID NO: 8756 - DNA, 233 bp, Glycine max
  Clone ID: 701101618H1
cccattacaattctctgtatttcagggttcacaattcacacgttgaattgaaatttggaaatcgtgacaccaaccctacaccaccatggcctccgtagacaaattttgggcttttgccctcgctcttctcctccttgcctcccctctcctccaagttgctaggtgtcagtcagactccgaagatgtagtggaggctgctgaatcctcaagtgatatcggcattgtgggggatg

SEQ ID NO: 8757 - DNA, 268 bp, Glycine max
  Clone ID: 701101619H1
caaattcccaattacccttcccaattctcaccaaaacctaatactcccacaccaatcttcgaccctggacgccgattcacaacctcaacaactcgaagagagaacagaggagcaagaactgaagtacctggaattcgtgcaattcgcgaccatacaggctctgatgcgctgcgccatcctctactcatacgccaaggagcgcgcgggtactctgaagcccggtgtcgacacgtggaggaggcgtgaagaccgtcgtggctcggtctac

SEQ ID NO: 8758 - DNA, 272 bp, Glycine max
  Clone ID: 701101620H1
cgacacctcccgtgtagttgttgctaaccaaaacgaccccacgccccatccccagtacaaatcaggtctcaacccctcgcccccaatttcctgtcgcctcccccttcttcactcccacccttcgttgacctcctattctcccctcatcggagctcaaatctccgatcccttcatccatatcgcttcaccgcaactttctcttcatccatcgcaagatctagttgaatctcaaccgcgctcctccgattcgaagctccactcactcaaatcct

SEQ ID NO: 8759 - DNA, 275 bp, Glycine max
  Clone ID: 701101622H1
aaaaaacaacagtggtacgtgatgccaccgaagttcgatccctcgcaggtggtggacgtgttcgtccgagtcaccggcggcgaagtcggcgcggcgagttctctcgccccgaagatcggtcccttgggactctccccaaagaagatcggagaggatattgcgaaggaaaccgcgaacgactggaagggcctccgcgtgacggtgaagctaaccgtgcagaaccggcaggcgaaagtgacggtggtgccatccgccgccgcgctggtcatcaaggc

SEQ ID NO: 8760 - DNA, 86 bp, Glycine max
  Clone ID: 701101624H1
gggaaccccagttatcatggaagacacacagcagtaactgctcctcggactataaattttcaacctattgctgtcccttccatcac

SEQ ID NO: 8761 - DNA, 274 bp, Glycine max
  Clone ID: 701101625H1
cacttccggtattgttctctattttggtgacatgttgttgcttactattaaaaagttacatgaattattgatgtcatcagagttagttactgcagaatatgaaataagtagaagtgagataagcattataattcaggggcttgtgcttggtcttctgctatatccaatagctttgaaatatattctccaaatatgggagtggtctataaatacaacttctgctgaagcaagaagatactatgagattgggaaatctcttatgtttgttgcttct

SEQ ID NO: 8762 - DNA, 277 bp, Glycine max
  Clone ID: 701101626H1
ggcagctcaaacccttgagtcaattttggtgtctgacgttcaagattttgtcattgggaaagatggggtgaagattccagtgtcagaattgaaggggaaggttgtcctcctctacttctcagctcactggtgtcctccatgccgtgcattccttccaaaacttattgatgcatataataagattaaggaaaagggcaatgcattagaagttgttttcatctcaagtgacagagatcaaacctcctttgatgaattctttgcgggaatgccatggttg

SEQ ID NO: 8763 - DNA, 273 bp, Glycine max
  Clone ID: 701101628H1
gcaactttccacttcatccaacacatctcataagatagtgaatatttctgttaatgtaaatgcatggaagccaccacaacatcaggaaccacgagaggttacagaattagatggtaatagaactttttacaatgaaagagctcccagatctagtacacggccagtgaaggagaatgccaacactctaaaagttagtaatgggaatgcaaacctgctcttgatgttcagaagagtttagcaaggctcacttaaccgcttctggttctaatgctg

SEQ ID NO: 8764 - DNA, 273 bp, Glycine max
  Clone ID: 701101629H1
tcgagcaccttttggggagaccaccggagatatgtacggacggagtgattcttacgaatccgatttggcgcttctggattcgattcgccgccacttgctgggagagtccgaattgatattcggagccccgaatttcggttcgggtcggagctccagtttcagcagcttggactcgtgtttgagtgatgattggggagagcttccgtttaaggaggacgattcagaagatatggtgttgtacggcgttctccgtgacgcagttaatgtggggtg

SEQ ID NO: 8765 - DNA, 277 bp, Glycine max
  Clone ID: 701101630H1
tggctttctttattctctccttcctcttccttcttcttgtttcatctgccactgcttgtgatcgctgcttgtatcaatccaaggcttcctatttctccaaagcttctgctctttcatctggggcatgtgggtatggctctttggcactagacataagtggtggacaccttgcagctggtgtggattctctcttcaaaaatggagcaggttgtggtgcctgctttcagataagatgcaagaacccaactctatgtagcaaagaaggtaccaaagtggt

SEQ ID NO: 8766 - DNA, 256 bp, Glycine max
  Clone ID: 701101633H1
cttctctttgttcttctaccttattttctttccctagtcaaggagattcatctctgcagcaggttgttttagaaaagaaaaaatgctgaagatttgctgcattggggctggatatgtggggggtccaacaatggcagtcattgcactgaaatggccctcaattgaagtggctgttgttgacatctctaaatccaggattgcagcatggaacagtgaccagctccctatctatgagccatgccttgatgatgtggtg

SEQ ID NO: 8767 - DNA, 271 bp, Glycine max
  Clone ID: 701101635H1
ctcatcctgactctgaaacacaaattggagcacatagtgtcttctccatggtgcttatgccatccatgtgttctccttggttagaccccaaaacaaagattgctcagaatgacaacttctccactcagcatgaaactctttctggagctgaaaactcgaatgggaaattggaagaaggaaaggcaatagccagtgtcaatgggaagaaatatgtgattcatccatatcgtggctacagctttactccgaagctaactgatggagaagatga

SEQ ID NO: 8768 - DNA, 268 bp, Glycine max
  Clone ID: 701101638H1
ggttgggagaaagcaaaggcctccaagcctccaatgttgcctgatgactttgacaaaccggagtttgccacggtcaacattcagcgtgatctgttctatggttacgatactctcatggagaatgtctctgatccttctcacattgagtttgctcatcacaaggtcacaggaaggagagacagagccaagcctctgccattcaagatggattctcgtggttcatggggcttctctggagctaatgaagggaacccacagatcagtgcca

SEQ ID NO: 8769 - DNA, 271 bp, Glycine max
  Clone ID: 701101641H1
gaacaattcaatggagcttgtatcccccagaataaattcagaaaatcataatctgcctcagtcaaactggcactttcctggttctagggagatgtcagatgttggagcaagaaaacctgatggttatgataatttgtcacaggatcctcatcaaggaggtattgttccgcattcacactctggagcacatggaccttcgattccagcaccacaacaaattcactcttctccgtttggtcggcctgtttatgttcctcctaatggtccatgg

SEQ ID NO: 8770 - DNA, 65 bp, Glycine max
  Clone ID: 701101643H1
ctcgattaggagcgttgaatttgaatgcggagtttatggcggtgatgcatgagatgataaggaag

SEQ ID NO: 8771 - DNA, 275 bp, Glycine max
  Clone ID: 701101644H1
caaaacaatgacaatcttcgcagtccccttatatctcaggcttaatgccaaggcacaatgtcattcaataataaaccagttgtgttggttcttcccagtatatgatgcaaatattcatatgtcaagggcaatgaagtgcaaaaggggcttgtatatgcttgtttgtatagatggaaaagtcttgaattccgaaagagtggccaattttttccagcttcttaaatgaagagcctaaaacttgcatatagcactgaagttatcttttgccttggctc

SEQ ID NO: 8772 - DNA, 275 bp, Glycine max
  Clone ID: 701101645H1
atcgcaattcacaaaatgggcaattgcttgaggcgccaatcgcggatcggatactccaccgacgacgatgaggactgggaggattttcgggcggcggcggcggcaagcggtggtgttaagacatcgacgagagaggtgaaaattaagataacgaagaagcagttggtggagttggttggtaaagttgaggtaaaggagttgagaatggaacaggttttggcacacttgatgaatcactctcttcaacgtccatggaggcctgctcttcaaagcat

SEQ ID NO: 8773 - DNA, 88 bp, Glycine max
  Clone ID: 701101646H1
ctttattggattatttattagttaagtaaatattgtacccatctttttggaatatgttttgtcatttacacaagttatttttctggcc

SEQ ID NO: 8774 - DNA, 136 bp, Glycine max
  Clone ID: 701101647H1
gtcggttttgaaaagagttaacaatctcttctcttcgctcctgcacttgttgtttctttgcccttcatggcatctcaggctagccttctccttcaaaagcagctcaaagatctttgcaaaaaccccgtcgacggct

SEQ ID NO: 8775 - DNA, 265 bp, Glycine max
  Clone ID: 701101648H1
tgagaaaaaaggtggtggaaactggcaatcgtgtgataccagagagctgttttatagtttccaccgtgacgatgatcctgcagaggctgttatgcacaagtgtgtggtgcattttgttcccagacacaaacagcttccaaagcgtaaggatcaccccgggtttattgtacagaaggtgtatgacactgtggaaagaaaactctggaggctgactgataaggattatgaggaatttaagcagcaagagattgatgtgcttgttgag

SEQ ID NO: 8776 - DNA, 261 bp, Glycine max
  Clone ID: 701101649H1
ctgacaatgtgcagccttcaacagcagtgcctagcagtctagaaccagtagttatggaaaagcataaaggagtaaatgattcagctcatgttactgtaacaaaaatgttggccaatcttgaacgtccaagtgcacgtgcacgtgtgcagcctaagccatctaatgttcggaatctggatgccaagaatcatactgagaaacatggtgtgaacaatagtccatctacttcctcccattcccaaatcctctacagaaaatgtc

SEQ ID NO: 8777 - DNA, 267 bp, Glycine max
  Clone ID: 701101650H1
gagagacataagcataatattgagaaataatggagggttgtacttattgtgtgaagttgctatgccttgttgggtttgtggtgcttgtgagtactattgcaggggtggagagtgctggtgaatgtgggaaatctaccaccccagataatgaggcttataagcttgcaccatgtgcctcagcagcacaagatgagaatgctagtgtttctcagagttgctgtgctcaggtgaagaaaattgggcagaacccaagctgcctctgtgcat

SEQ ID NO: 8778 - DNA, 266 bp, Glycine max
  Clone ID: 701101651H1
atcagaatcattaaagataagattatattgctaagaagaaaaaatatgaaggttgtctacttgcttgttgccctcttggctttgacatcaactgttgtctctgcctatgaccctagtcctctgcaagatttttgtgtggcagccaaagaaaaagatggtgtatttgtgaacgggaaattctgcaaggaccccaagcttgtcaaagcagaagatttcttcagacatgtggaacctggggaaactgacaacccactaggttcaaacgt

SEQ ID NO: 8779 - DNA, 264 bp, Glycine max
  Clone ID: 701101652H1
gaaacatttcactaatagagagacataagcataatattgagaaataatggagggttgtacttattgtgtgaagttgctatgccttgttgggtttgtggtgcttgtgagtactattgcaggggtggagagtgctggtgaatgtgggaaatctaccaccccagataatgaggcttataagcttgcaccatgtgcctcagcagcacaagatgagaatgctagtgtttctcagagttgctgtgctcaggtgaagaaaattgggcagaa

SEQ ID NO: 8780 - DNA, 271 bp, Glycine max
  Clone ID: 701101654H1
atatattccattctctctgtgtatttccctacctctcccttcaagatgcagatcttcgtcaagaccctcaccggcaagaccatcacccttgaggtggaaagctctgacaccatcgacaacgtcaaggccaagatccaggacaaggaaggaatccccccggaccagcaacgtctcattttcgccggaaagcaacttgaggacggccgtacccttgctgactacaacattcagaaggagagtactcttcacctcgtcctccgtctccgtggtg

SEQ ID NO: 8781 - DNA, 271 bp, Glycine max
  Clone ID: 701101655H1
tggtggaggaggaatacacgaagcaatatataggcaatgaaatgaggcgttttgactggccttttcggatcggatcgaatccaaaccctaatctaatcccacaagcctattagtctcattcaatcgaagaagcgagcgagactgtgtctctctcccaggccatgcgaccaccctgttcctccgccatcgccctctccagagaggattcttttttcggtttcgtcgctttctccgtcgattccaccagccatgactgcagtacaccacgccg

SEQ ID NO: 8782 - DNA, 270 bp, Glycine max
  Clone ID: 701101656H1
ttctgcaccgagattcattcttcaccaaaacttcgcaaagaaacactacacatccatggcaactgctggcgtgcaagaagttcgtgttccccctctaacttccacctctgagccaccttctctctttgacggaaccaccaggttgtacatcagttatatttgtccctatgcgcaggggtttggatcactcggaactataatggactacaagacaagatcaaactcgttcctattgacctacgaaacaggcctgcttggtataaggagaaa

SEQ ID NO: 8783 - DNA, 105 bp, Glycine max
  Clone ID: 701101657H1
tcaatttggaaaaatgacgcataaatcccaaactggatctgaaattttcagatctcctactttcacaccccctgttcggaaaccaagaaccgacacagacccagt

SEQ ID NO: 8784 - DNA, 271 bp, Glycine max
  Clone ID: 701101658H1
ctcgagccgctttcagctccggcaacctctcttccggcgccgccgccatctcggccgcgcaccaatcttcaatttgattacttgggtcaacgatttctgtcattctcaatcatggcaactagacttcagtttgaaaataattgtgaagttggagtcttctctaaacttaccaatgcctactgtttggttgccattggtggttctgaaagcttctacagtgtatttgaagccgagttagcaggtgttatcgctgtggtcaagacatccattg

SEQ ID NO: 8785 - DNA, 269 bp, Glycine max
  Clone ID: 701101659H1
ctttcttcctcttcctcagtagtgcgattttcgactctcttctccgcaactatgcctaaccctaaggtcttcttcgacatgaccatcggcggtcaacctgccggccgcatcgtgatggagctctacgccgacgtgactccgagcaccgccgagaacttccgcgcgctctgcaccggcgagaagggcgccgggcggagcggcaagcccctccactacaaaggctcgtccttccaccgcgtgatcccgaacttcatgtgccagggcggcga

SEQ ID NO: 8786 - DNA, 259 bp, Glycine max
  Clone ID: 701101660H1
tgttgctcaggttactagcaatgctctctcgcttattaatcagtatgctgcacaacactagggggagttgggaagaaagtttttgttttttgttttcgttttttcctttgaggggaaaaaaaaaaagaacaaacagttctatgtggttggttaatggttaattttgtgttttgtgtggtgtatgtaattgtgagtttttatagagatatggatcttgtgttgcttctgatcaaatgtgaaatatgagtcctgtttttgt

SEQ ID NO: 8787 - DNA, 129 bp, Glycine max
  Clone ID: 701101661H1
cgccagagctccatcaccggaacaagacccaggcaggtgtcgcagtacgcggatagaggacgctatataaatatatttgtccccgatgctctctatttcagccactcgtatattcttcctccgctcaac

SEQ ID NO: 8788 - DNA, 273 bp, Glycine max
  Clone ID: 701101662H1
cagcagttgtcgtattgcattgcgcagtttgtggagaaggattacaaactcgcggacacggttattaggggtttgttgaagtattggccagtcactaattgccagaaggaggtgctcttccttggggaactacaggaggtgctggaggccacgcagaccgcggagttccaacgctgcatggtccctctttttagacaggttgcccgctgcctcaatagttctcactttcaggttgcagaacgagctctctttttgtggaataatgagcatatt

SEQ ID NO: 8789 - DNA, 276 bp, Glycine max
  Clone ID: 701101663H1
atggcttcttcgtcttcagaatcggcggtgtcggagcgaagaggaataccaggggctcagttcgtagaggatgtccaaacttacctcactcaatcgggtctcgatgttcgttcagccctggcttttctccaagagagacttcagcagtacaaggtagtagaaatgaagcttcttgctcagcaaagggatcttcaggcaaagataccagatattgaaaagtgcttagacgttgttgctacattgaaagctaagaagggtactggtgaggaacttatt

SEQ ID NO: 8790 - DNA, 255 bp, Glycine max
  Clone ID: 701101668H1
caattcttgagctatgtttcagggataatagggcagggatgtacaaagaacgagagcgaggtggtgtttccgtttccgcctctaaatccgaggatcggaagcgaatcaacgacgttctcgataagcacttggaacgatcctctccttccacttcccgccccatcaacaccgcttccaagaattccaacctccaagtggaggaatctgagacggagagtgaagagtctgatgttagtggctctgatggggatgaca

SEQ ID NO: 8791 - DNA, 266 bp, Glycine max
  Clone ID: 701101669H1
gcaacgtctcatcttcgccggaaagcaacttgaggacgggcgcaccctcgccgactacaacatccagaaggaatcaacccttcacctcgtcctccgtctccgtggtggcatgcagatcttcgttaagaccctcaccggcaagactataaccctagaagtcgagagctccgacaccatcgacaacgtcaaggctaagatccaggacaaggagggtatccccccagaccagcagaggctgatcttcgccggcaagcagctcgaggacg

SEQ ID NO: 8792 - DNA, 269 bp, Glycine max
  Clone ID: 701101671H1
caactctgtcttatatgacgatgacttggaaagttatatgctttttaacatcgatggtaagcaagttctacaacagatggtcattgaagttggagacacctttaagaaaattctggaagagacagggaaagtgagggatgagcataccgaggacatttcagtttcccaagctatttcaattgtgctagataagcactctgatctaaggcaacaaggacttgcccatgaagtgctacaatggtttatatgcagaatggaagcttggtttg

SEQ ID NO: 8793 - DNA, 266 bp, Glycine max
  Clone ID: 701101673H1
gacacttcaggttcttctgaagggtacacttctgcagcttttcatcctgatggtcttattcttggaaccggcaccacagaatctctcgtcaagatttgggacgtaaaaagtcaggcaaatgttgctaggtttgatggacatgctgggccagtaactgccatatctttctctgagaatggatacttccttgcgactgctgctcatgatggtgttaagctttgggatctacgtaaattgaagaacttcaggaattttgctccatatga

SEQ ID NO: 8794 - DNA, 268 bp, Glycine max
  Clone ID: 701101674H1
gaaagatgggacgcgaagacggaagaagaagaagatgaagaagaatgcaaaatctgggggttttgaatcacttggtctgaatcccaatgtgttcaaaggaatcaagcgcaaagggtacaaagtgcccactccaattcagcggaagaccatgcccctcatcctttctggctccgacgtcgttgccatggctcgcacgggctctggcaaaacggcagcgtttcttgtccccatgcttcaccgcctcaatcagcatatccctcagtctggt

SEQ ID NO: 8795 - DNA, 267 bp, Glycine max
  Clone ID: 701101675H1
attgcaggatatcagtcaacctaaaacagaatatgacttacctgctggtgtactgtctgtctctcttctgagacatcagaaaattgcattggcttggatgcttcagaaggaaaccaagagtttgcattgcttgggggggattttggctgatgatcagggccttggaaagacaatttcgatgatttccctcatcctggcacagaggacattacagtcaaaatcgaaaatagatgatacatgcagtcataaaactgaagctttgaattt

SEQ ID NO: 8796 - DNA, 266 bp, Glycine max
  Clone ID: 701101676H1
ctgcacttggccattagattctcctgttcctcaatggttgactctgatgcaacagtatttcaagcctcacttgccaaaaatgcactataagaggccacttaacttaatggaacaggaaaagctgcgacaccaagcggtcaatgttgttgctgctcgacttagtagggcggaacccccgcttagaaaggaggtacttgaatacacgtgtgacacagagtctcatctctggagtatgaggcgcacaaggcgagcttctaccgtctgat

SEQ ID NO: 8797 - DNA, 266 bp, Glycine max
  Clone ID: 701101677H1
ccaagatgaagaggcagagaggtgtgcatgtgaatgctgttaggcccatcatgaataataatcctcccaatgttgaagatgtagctgcagctgcaatggggaagaagaaagtgaagaaagagggtgagcagaaggtggggaatattatggtggaggaagaggagataaaggaaagtagtactagtagagacagcatggtgggtgggtatttgcagcaacatcaacaaggtggcatgctgatgggttggaattgggaggagaatatg

SEQ ID NO: 8798 - DNA, 272 bp, Glycine max
  unsure at all n locations
  Clone ID: 701101678H1
cctccttacactccccacccagtttatcactctcctccaccacctcctaccaacaagccttacatctatgcgtcacctccccctccttaccactattagctagcatagctctatggatatgaagaatatgtgcaacgaataaaagaaagcgatagacaaggaagaagaagcgcttcgcgatgcacgaaagagaagaattggaagcaaagtttcggcgttttgtcttttataaaaaaaatgttanatcattataattttctatgatagggatg

SEQ ID NO: 8799 - DNA, 188 bp, Glycine max
  Clone ID: 701101680H1
tcagattcttgactggttatctcacagtcctactgatatggagagctacatacggcctggttgtattgttttcaccatttatctgcgtcaggctgaggctttgtgggatgaactttgctatgatctgacttccagtttgaataggctgttggatgtctcagatgatactttttggagaaacggatggg

SEQ ID NO: 8800 - DNA, 265 bp, Glycine max
  Clone ID: 701101681H1
caaatttctcattctcccatttcctctcagaaccctcgatcactcccacgcgctcctatatcctctccttcaccgtcgctctctccaacgatcacaacaacatcgtcatcccatggcaaacgccgcatctggtatggcagtccatgatgactgcaagttaaggtttttggagctgaagacaaagaggacacaccgtttcatagtttttaagattgaggagcagcagaagcaggtcattgtggagaagcttggtgagccagcccaa

SEQ ID NO: 8801 - DNA, 240 bp, Glycine max
  Clone ID: 701101682H1
agatgagtgaggctgcagctacgacgacttcgtcttccatgatgcgcaattaccctctcatttccgccatcgttgctttcgccatcgcacaattcatcaagtttttcaccgcctggtttaaggaaaaaagatgggatcccaagcaacttgttggatctggtggaatgccttcatcccattcggctactgtcactgctcttgccgcgggaatcgggttccatgaaggctttggaggactct

SEQ ID NO: 8802 - DNA, 238 bp, Glycine max
  Clone ID: 701101683H1
cgaaagcgattttgacggaagaagaacctgaggccgatttttgctgggaacttggagtacgatagtcgtcaatcagaggttgagcgcttgtactcagagtattgaaggattgaccgcgtggacatgaaatctggttttgcttgtgtctattatgacgatgagcgtgatgcagaataagcaattcgtgcacttgacaatgttccatgtgtggcatgaagagcgcagctgttagttgagt

SEQ ID NO: 8803 - DNA, 259 bp, Glycine max
  Clone ID: 701101685H1
attaaagaaagagtgaccgagagcgatcgagagagagagagagagagagagcccgatcttcctctatcgatctctgctctttcctcccccctttcaagattcgttgcattttctcatttctcgcgaattccgaaatcgcgttccgttggctctcgactcccacgctccacgttcacgattttgattgagatgaaacttgaaagggcttgatagtcaacaagggaagagcgagtgccgaggcccaggttcatgggagagt

SEQ ID NO: 8804 - DNA, 264 bp, Glycine max
  Clone ID: 701101687H1
caaatctcctccttagactgccaacccagtatagccattggatcgaattcagtctgaattcggtctaatggtttgggagttctaattaagtctaaggaacagaattctgtacatatatatatttagaagatcacagggtgcttgatcagtggtgtatcaggagctcccaggtcccgaggttggcttctgaaaaaggtgtggtgattttcacaaagagctcttgttgcctctgctatgcagtcaacattctgcgtcaagaacttg

SEQ ID NO: 8805 - DNA, 265 bp, Glycine max
  Clone ID: 701101688H1
gttgaagcctctgatgaggcttgcttatattaacaccattgtctacccgtttacctcaatcccattgattgcttactgtacgcttcactgcattttgtcttctcacaaataaatttattattcctgagataagcaactttgccagtatgtggttcattcttctctttgtctccatttttaccacttcaattcttgagcttaggtggagtggggtcagtatagaagactggtggagaaatgaacagttctgggttatcggtgggac

SEQ ID NO: 8806 - DNA, 267 bp, Glycine max
  unsure at all n locations
  Clone ID: 701101689H1
ctcattccttcatttttaaacctagctccatctccctccactcaccataacatgggatcagaagcaaatgctgccaacaccaacttctgtgtaaatgttagcaacaatggctacattagtgctaatgacnccttgaactggggtgcggcggcggaggctatggctgggagccacctcgacgaggtcaagcgcatgctagaggagtaccggaggcccgtcgtcaagctcggtggagagaccctgaccatctcgcaggtcgcggcgatc

SEQ ID NO: 8807 - DNA, 265 bp, Glycine max
  Clone ID: 701101690H1
tagacttagaggcaatttctgctagtagctctgaggtcccatcaatattagagttcctgcagcggcggaagttggaagctaacaaggctaaacaattgtgcttgggtataacacgtacacttattctagagcataggcctgtgcctgtggttgccaaggctgtaaatgtactagtcacctcatactcccattcaattaaaaccggtagctatcttaagggaccgaaaccagagaacacatcaacttctgttgtacaaaatactgg

SEQ ID NO: 8808 - DNA, 264 bp, Glycine max
  Clone ID: 701101691H1
agaaaaaataagcaaactgaagagcctgaaaaaaacatctccgtcagcttgcattgtttttcctcctaagatcttccggttgttggagaaaccattgcatgagtttcgggggcacagaggtgaagttttggatctctcttggtcaagcaataattatcttctgtcatcttcagttgacaaaactgttcgtctatggcaagtgaatcatgaccgttgcttgaaagttttctcacacagtaattatgtgacgtgcatacaattcaa

SEQ ID NO: 8809 - DNA, 266 bp, Glycine max
  Clone ID: 701101692H1
cggctcgagcttggatactggaatagtgtgccaatatgagctctcgggcaggcaagggacctgccgtcagaagttatcggaggagaaagacagcgttggaccttgaccttaaccgtgtaccagctggtgagaatcgtgagcaggagggaccttcgactcagtcggtgcctcgagaagttcaagttgaacagcagcagcaggctactcaacctccgatgattgacgtggaagccattgatgatgatgttgttgaatgtaccccaagg

SEQ ID NO: 8810 - DNA, 266 bp, Glycine max
  Clone ID: 701101693H1
gtttcgttattcgcccgacacattttttctccgatcccctattcctctccattctccgttgtgtcgatttttgttactcaaaagggaaattgatttgatagatagacagatagatcgtttctatgggttaaagtgaaatccgaatccgaatctgaatctgaatctgatccaatcattttcatgttagggcgtgcgatctccaatcaagcgcggttgtgtttaggtttcattttgttgggcgtgtgagtcgtagggggtttcgaaga

SEQ ID NO: 8811 - DNA, 268 bp, Glycine max
  Clone ID: 701101694H1
agttaaacttggaacccaaggctttgaggtttcaaaattgggattcggatgtatgggccttactggagcgtacaatgaccctctccaagaacaggatggcatatctgttatcaagtatgcgttcagtaagggaatcacattttttgatattgcggatgtttatggagccaatgctaatgaacttttggttggaaaggctttgaagcagctgcccagagaaaagattcagatagccacaaaatttggtattgcttcacgaggttttcct

SEQ ID NO: 8812 - DNA, 270 bp, Glycine max
  Clone ID: 701101696H1
ttcgtagatcgaaagggaatcttcttccatggcctccaagcggattctgaaggagcttaaggacctccagaaagaccctccaacctcttgcagcgccggtcctgtagcggaagatatgtttcattggcaagcgactataatgggtccccctgatagcccttatgctgggggtgtttttctagttactattcattttcctccggattatccattcaagccacccaaggttgcatttaggactaaagttttccacccaaatatcaacagcaa

SEQ ID NO: 8813 - DNA, 202 bp, Glycine max
  Clone ID: 701101701H1
cttaaataaatgtcttcctagcaagattagttttagatgcagtgatctaaatgcaattcttctcattgaaattaactgtgtttgccggtgtactgttgcatagttgtttaataccagtttttggagggagaggagaggggagtacaattgaattttgctctcggaaagatgctaaaatttcataatggaactgaatatcatt

SEQ ID NO: 8814 - DNA, 241 bp, Glycine max
  Clone ID: 701101702H1
cactcgagccgattcggctcgagaaaaacaccaattctccagcctcacattgaaaaaaacacaacgcagacaagaaaaatcaatgattttattttatttttctacgaaaatggttgatttacattggaaatcaaagatgcctagttccaaaacaccaaaactctctctctccgacaacaagtccttaccctctttgcaactacccttccgcaccacagatatctcactcgccgctccttcc

SEQ ID NO: 8815 - DNA, 184 bp, Glycine max
  Clone ID: 701101703H1
gacataacttgcctagattggttggatcagcagccacctcaatctgttgtgtatgtctcttttggtagtttagcaatagttgaacctaaccaattcaaagaactagctctaggacttgatctccttaacatgccttttctttgggttgtacgttccgacaataataacaaggtaatagtgcata

SEQ ID NO: 8816 - DNA, 279 bp, Glycine max
  Clone ID: 701101704H1
caagaagatgactggggggggtatcactatgcaatcgacgccgggaagctcaggatacttggatttgtatccagagcggaagatgtcctttttcaaaaatccttacattctcggactggctgctgtcgccggcatcggtggtctcctcttcggctacgacactggtgtgatatcaggggcacatttatacattaaggatgattttgaggaggttagaaacagcaatcttctccaggaaacaatagtcagcatggctcatcgcggggcaatcgtgggagc

SEQ ID NO: 8817 - DNA, 201 bp, Glycine max
  Clone ID: 701101705H1
caaggttatctaggaaactctctgatatcagaagtccacaatccaacttgagcgatcatgctggggaccatcccgttaatgattattcaatagacagacaaatggatacaattcacaggaacttgtctgacgcattgaatagtgattcaaagaatgatgagaggacaatgaagcaggatgacatttctagtgtacttaatc

SEQ ID NO: 8818 - DNA, 205 bp, Glycine max
  Clone ID: 701101706H1
ccaatccggtggctttgacgattaactatcagcaggcggataccgggaccaagatgatacacaaagggaagaacacgaggagtaggattatatccaaaggaatatcggttgggcattccaggaactgttatagagggcttgttcaggttctgtccaaggctgacaatgcccgaaactcgtcacagtgtgattctatgcttattgg

SEQ ID NO: 8819 - DNA, 140 bp, Glycine max
  Clone ID: 701101707H1
tgccattcgcgtttcgagcagtggcatcaaggacttccattgtcaccccatcaatgctcgactgtcgttctgatgaagcacttgtggtgagttttgcattccagcttcatcaggactacagtcgaggttctagaccgcga

SEQ ID NO: 8820 - DNA, 245 bp, Glycine max
  Clone ID: 701101708H1
cgaattgttgcaactttttgattcctaaattctctaaaattcgaaattctaatttcgttaggggaaagagattgtttgtgtgtgagtgagtatggctggaaaaggcgagggtcctgctatcggaatcgatttgggaacgacgtactcttgcgtcgacgtgtggcaacacgatcgtgttgaaatcatatccagcgatcagggtaacagaactaccccatcctacgtgggtttcactgacacagaac

SEQ ID NO: 8821 - DNA, 126 bp, Glycine max
  Clone ID: 701101709H1
cgcaaaacgctgctttggttcttaaggagatgcatgttgaggctttggtgaaatgtgtaggagtttttgaggctttgattaacatgattaaggagcctgttgggagtggttccaccaaggcctgtt

SEQ ID NO: 8822 - DNA, 261 bp, Glycine max
  Clone ID: 701101710H1
ccaagagtgaaaaccttctcttacccttctctcaagtttcaagagatttcatcatggctccaaagaaggacaaggctccaccaaattcctccaagctcgccaaatctggcggtggcaagcagaagaagaagaactggagcaagggaaagcaagacgagaaggtgaacaatatggtgctgtttgatcagggcagctatgacaagctccttgtctgaagctcccaaatacaagcgaatcactccttccattctctctgatcgt

SEQ ID NO: 8823 - DNA, 189 bp, Glycine max
  Clone ID: 701101711H1
caacgatcccaccaccgataaactcatcacgtggggcacagccaacaacagcttcatcgtcctcgatcccctcgacttctcccactcactcctccctactttcttcaagcacaataacttctccagcttcgttcgccaactcaacacctatggtttcagaaaggtggatccggatcggtgggagttcgc

SEQ ID NO: 8824 - DNA, 195 bp, Glycine max
  Clone ID: 701101712H1
ctccgatggcttcgaccaagcaggcttcgcccaaacaaacaacaacatgcagctcttcctgggctccttcagaacaaacggttacaggaccttgtctctgctcatcaaaaaacaccaacagactccctctaccgtcacctgcattgtctacgactcctttttcccgtgggatctcgacgtggccaagcagcatgg

SEQ ID NO: 8825 - DNA, 259 bp, Glycine max
  Clone ID: 701101715H1
ccggtctaattattcaggtaccgagggaatcaatgttttttgttattcctgcttttggtggcattgtttcctgggagggagaaggggcaccttttggggaatctgaccagagcatttctcatcagattgttgacagggaagcacaaggacatcggttcctctcaagagcatatgttccacccacagtgggtatatgactgtgtgaatgcacggattatcccgccaactgagaattatttggtgggaacgcctcctccac

SEQ ID NO: 8826 - DNA, 281 bp, Glycine max
  Clone ID: 701101718H1
gagtctgaagaagctgaagcttctggagcgaggtggaggctgatgaattaccacagaataataaggaagctgagaataatgatgatattcatcaaaaaagtaatggcgatgttgagatggctgtggaggctaagcctgaagactgtggaatggctgatagtaaagcatgtgataatggtgaccctgtgcttgcaagtcataatgagcctgctacgccacagcctgctcctgcagatacaaacactgaaattatgaatgtattagaagttgagaataaagtt

SEQ ID NO: 8827 - DNA, 142 bp, Glycine max
  Clone ID: 701101721H1
cttcgctcaagctgtgacatacggtttaattgtttatgacatgaaccgagttgactgggactgagagccattcttttggtatctatttatcagtttcgtcacattgttgtactttactttctacggtatgatggctgtggga

SEQ ID NO: 8828 - DNA, 184 bp, Glycine max
  Clone ID: 701101723H1
cagggaatcaaagaagacatccatgatgacattgtctcagccctttctaaacgatgttgagagcctagattcatcatcaataactacaacagagtcatatttttatgggaagctgattgcaagggctgcaaggttggtattgattgctgaggagttgaactaccctgatgtgatttcaaaggtt

SEQ ID NO: 8829 - DNA, 179 bp, Glycine max
  Clone ID: 701101724H1
ggacgcgattctggcatgagttctgagactatcaattcatccactcaaagtactccactgagcaacgagcgcgtttgtagcaccagcttcagccgtctctccttggatcttgctcctccttcttcttcgcctgagaccctcttcgtcaaaccccagcgctcatccgacttggctcactc

SEQ ID NO: 8830 - DNA, 275 bp, Glycine max
  Clone ID: 701101726H1
cgcaccggtgcttgattgccacacttctcacattgctgtcaagttttctgaaatcttgaccaagattgacaggcgatctggtaaggagcttgagaaggagcccaaatttttgaagaatggtgatgcaggtatggttaagatgattccaaccaagcccatggtggttgaaactttctctgagtatcctccccttggtcgttttgctgtgagggacatgcgtcaaactgtggctgtcggagtcatcaagagtgttgagaagaaagaccccaccggag

SEQ ID NO: 8831 - DNA, 277 bp, Glycine max
  unsure at all n locations
  Clone ID: 701101727H1
gcaaacttcaacttgtaatcaagggagagagaaaatttcaagcacaaaaaatggcggagaagaaagtggtgatcctaggaggtggtgttgccggtgccaaccttgcaaaaactatacaacgtcaagccaacgtcacccttattgatccgaaggaatactttgagattccatgggcaagtttgaggggattggttgagccncttttgctgaaaggatagtgatcaaccatagagagtacttcaaaaagggtaaccttgttgtatccagtgctgtcaac

SEQ ID NO: 8832 - DNA, 222 bp, Glycine max
  Clone ID: 701101728H1
ctcaatactcaattcatcatcagcttgtggccatagtctcattatttatccttctgcttccaaatatccatgggtggggagacgatgggcatgtcattgtttgcaagattgcacaggctcgcctcagtgaagcagctgcagaggctgtgaagaaactgctgccaatatccgcaggatatgacttgtccacaaagtgttcttgggcatatcatggtcatcata

SEQ ID NO: 8833 - DNA, 161 bp, Glycine max
  Clone ID: 701101729H1
cctggatatcatgacaacggcaggtggggtgtttaacgtgtatatttcatttcacggttgggtacaggcagaatgaaagtgcaggcgaaaagggggaaaacaaattggctagtgctgtgcgtcacgtctaatatcttagtttgtctgatctaatctaaatt

SEQ ID NO: 8834 - DNA, 264 bp, Glycine max
  Clone ID: 701101730H1
cgacatgtagtactagtgctccagctatgtggcttccaccagacgcacttcttgttccctttgtgaaccgaactgccaaggctgttgcttgggcaagtctgaaacatctccgggtgccaaacccattgccgtgtagcgataactgtggtgtgagcatcaattggcatttgtacacagcctacactaaaggatggcgtgcaagggtgacactttttaactggcgtgacactaattttgcagactggtttgccgcagtacaaatgg

SEQ ID NO: 8835 - DNA, 280 bp, Glycine max
  Clone ID: 701101732H1
gccatggtggactctcctgtgggtcaaaacctatgtgtttccaacatatttcacaagtcatttattgaagtaaatgaagaaggcactgaagctgcagcggccacctctgcaactatacgattgaggagtgcgatgcttccaactaaaatagacttcgtagctgaccatcctttcttgttactgatcagagaagatttaactggaacagtactctttattgggcaggtgctcgatcctcgtgcgggatgattttagtggccatacactggacaacattggt

SEQ ID NO: 8836 - DNA, 192 bp, Glycine max
  Clone ID: 701101733H1
cgaatacgtgatgaacaacatggtgttctctcaatcagcaatattacgcgaggaacttcaagaagcgatgagtattcaggagctcattaagaaaccactcacttcagttcctcaacgttacattcaactacaccataatgaaccttcacttctcgcaggtgaaacctttagtcacgcactcccaaccatcac

SEQ ID NO: 8837 - DNA, 283 bp, Glycine max
  Clone ID: 701101734H1
atcaaagtcggaacctgcatgcctttggtggctgcgtttcttccttggcgctgtgttggtggaatctctctctctctctctgactctgtgtctctttcccaggccaggaccgcgcgaaacacgtaaattccccttcaaacacacaaacaaaacgcagtgtttgaagcatctctatatatacccccccttctcagacaaacaatccccattccctcttctctaaccctatcttctctcttgtcttgattccattcaatttaaacctcagggcgtggcaagtttc

SEQ ID NO: 8838 - DNA, 166 bp, Glycine max
  Clone ID: 701101736H1
ccttggtgtgggtagccacatgcaggagcttaggagggttacgtacgggatcatgggggagaaggataacatggtcagcatgcatgatgtcatggatgctcagtgggtttatgctaattatagggatgagacttatttgacgagggttgtcatgcccttggagatt

SEQ ID NO: 8839 - DNA, 274 bp, Glycine max
  Clone ID: 701101739H1
cgcctctccctctctctcaaaaatcgttctcttcgattttagggttttgttttgctgctgcctccgttccccccttctcataaacaacgcgttttctcttctgcttcgtatctattctacgcttttggttttggttgattcaaggccttcacagcattcgttgcggcattttaatcgatttatccaagcaggactgaatgaactcatggagtctaaacgtgggaaaaagcagtctagtacccgtagctagtcactcattgttctccgtagctcc

SEQ ID NO: 8840 - DNA, 168 bp, Glycine max
  Clone ID: 701101740H1
cacaattcctacacatttctactctttagtttctccaattttctttctcaattctcaacaatggccactacaacacaacttcacttaccccctggattcagattccatccaacagatgaagaactcgtcatccactacctttgtcgcaaatgcgcttcgcaacatatc

SEQ ID NO: 8841 - DNA, 216 bp, Glycine max
  Clone ID: 701101742H1
agagcatgattgtggtgtgctttgttttcatttcatcatatgacagccttgtgggtttctttggtgtttcttgatgcatacttaatttactttattattgtgtatttatctcttccatttacaaaaaaaaaagtttgtgtaggtttccttctttgaagtaaaaagaaattaaatatgtactgaaaatggaataatagtgtgttttatttgtgtttt

SEQ ID NO: 8842 - DNA, 209 bp, Glycine max
  Clone ID: 701101743H1
tctgggaatagatctaaatgagacacaatggaaatgcttctatactgtgtgaaactgccaggttgctacaagacttgctcagtcagatcgagtccctcaagacagagcatgtcactctgttgtctgaatctaattatatgaccatggagaaaaatgagctgaaggaggagaattgtagcctagacacccaaattgagaaatttcaaggt

SEQ ID NO: 8843 - DNA, 178 bp, Glycine max
  Clone ID: 701101744H1
tagaaaattaaaagaaactagaggaaattgaaagagacaggaagacaggttgatgatggtggagctgaaacatctctatgttctactgtggacaaccggctgtggatctattacactgttgttgatcttttcattcattatgtatgaaattatgattataaaaatgtttggtttgcag

SEQ ID NO: 8844 - DNA, 284 bp, Glycine max
  Clone ID: 701101747H1
ataagctttacttacttcagcaatccacatatggcactttcttcttcatcatcttcaccatccatatttgccatagctttgttcactcttttgcttataggaagttcatcagctcaactctctgagaacttatatgatagtacatgtcacaaggtatatctatgccgtaaaatccgttcttcaatctgctttggctatagatatcgcacaggagaatctatcgttcgcctcttctctcatgactgcattgtcaatggtagtgaaggattagtaatacttgatgg

SEQ ID NO: 8845 - DNA, 288 bp, Glycine max
  Clone ID: 701101748H1
cgacgaccctttggtgtttggatcttcaagaaagagagacccttgggatttcgtcaccatgagtctcttcggtcttggaaacagaaaccataaaacatttcgtccaaaaaagagtgctccatctggaagtaagggtgctcaacttcaaaaacacatcgataccacgctcggtagtgggaacttgagggaggctgttagactgcctcccggtgaagatattaatgaatggctagctgtaaacaccgtggacttctttaatcaagtgactatcctgtttggtactcttac

SEQ ID NO: 8846 - DNA, 196 bp, Glycine max
  Clone ID: 701101750H1
ctgagtctgaagaagctgaagcttctggtgcgaaggtggacgctgatgaattaccacagaatactaaggaggctgagaataatgatgatattcatcacaaaaagtaatggcgatgttgagatggctgtggaggctaagcctgaagactgtggaatggctgatagtaaagcatgtgataatggtgacactgtgcttg

SEQ ID NO: 8847 - DNA, 199 bp, Glycine max
  Clone ID: 701101751H1
gtttgaaggtgaggattatgggacctaattatgtccctggggagaaaaaggatttgtatgttaaaagtgtgcaacgaactgtcatttggatgggaaagaggcaagaaactgtagaggatgtcccctgtggtaatacagtggctatggttggtcttgaccagttcatcacaaagaatgcaacattgacaaatgagaagga

SEQ ID NO: 8848 - DNA, 117 bp, Glycine max
  Clone ID: 701101752H1
cttttatgtctgaattagacgatcaaacacctactgccttcgatccttttgctgatgcaaatgctgatgactcgggtgctgggtcaaaggagtatgtgcatattcgcgtacagcagc

SEQ ID NO: 8849 - DNA, 185 bp, Glycine max
  Clone ID: 701101753H1
gtgatttggagtttggagcgactgaactaatcattaatttgcactcgctgtttcagcttcatcacccttcttttgcatcatttatatctcttgagaaatggcacaagaaacctttctattcacatctgaatctgtaaacgagggtcaccccgacaagctgtgcgaccagatctctgatgcagtac

SEQ ID NO: 8850 - DNA, 233 bp, Glycine max
  Clone ID: 701101754H1
ggtggttagaacttgagactaataatggatggtatagttcagctggagaggcaacttgttgattatactgcttcactatttcatgagggctttctagatgaccaatttaaccagcttcagcaacttcaagatgaaagtaacccagattttgtggttgaagtggtgactctcctttttgaacgacgcgataggcttcttaatgagctccacaaaagcactaggccagccaagca

SEQ ID NO: 8851 - DNA, 227 bp, Glycine max
  Clone ID: 701101755H1
cgaaaccggcgactttattgagtctttaacaagagttatgcaaaaggggttctttgaatcacgcgcttatgcagtgttcttgttgaaatccatgtccgaagtggctgagccagtgcaattattgcatctaagacaagacctttttgtcgaactagtacaagtcttgaaggatcaaacttctcacaagacatcagaagcaacacttcaaaccctgatccaattctctc

SEQ ID NO: 8852 - DNA, 102 bp, Glycine max
  Clone ID: 701101756H1
ctccaagctattgggttggccactgacgtcaagttacccacagagcgtcagccgcagacaatggcattcaatagtgactcaattgccacatggcacaccata

SEQ ID NO: 8853 - DNA, 220 bp, Glycine max
  Clone ID: 701101757H1
ctcttcttgacaatgctttgccacatgaagttcggcttgttcctcttctttgccttcttcgtgttgatcatgacattcttcgtctacttcttcttgcccgaaacaaagggcattccaattgaagaaatggggcaggtttggcaggcacaccccttctggtccagattcgtggagcatgatgattatggcaatggtgttgagatgggaaagggagctatta

SEQ ID NO: 8854 - DNA, 274 bp, Glycine max
  Clone ID: 701101758H1
tcgaactgccactgaggcacccacagttattcaagtctattggtgttaagccaccaaaaggaattctgctgtacggacccccagggtctggtaagactttaattgctcgagcagttgcaaatgaaactggtgccttctttttctgcatcaatggcactgagatcatgtcacagctggctggtgaaagtgaaagcaatctgaggaaggcatttgaggacgcagagacaaatgcgccatccattatcttcattgatgagatagattcaatagctcc

SEQ ID NO: 8855 - DNA, 278 bp, Glycine max
  Clone ID: 701101759H1
gtccaagttttttgagctgggtctgaacaaatccccagaagaaaagaatggggggaaagaatctatacctagtattaagctatcacctcctccagcaccactttcacctgttttcggcacgcagaagtctccaacaaactcacctacaaatctcagccttgagaaaactaatatagttgagactcctaaaacagttaaagacacagaacctgaggattctcctgaaaaacaaagcacagaggatgtactagatgatgattttggcgatttccaagcag

SEQ ID NO: 8856 - DNA, 149 bp, Glycine max
  Clone ID: 701101760H1
catttctatgaccaagtgcctgactcaatgagaagccttggaatagcactttaccttagtgtcattggggctgcaagttttcttagtagtttattaataacaattgtggatcatgtcactggtaagattgggaagagttggattggtaa

SEQ ID NO: 8857 - DNA, 204 bp, Glycine max
  Clone ID: 701101761H1
ctctgaggatctttttgctttgaggatcataacacccgaaatttgtagttttcttcttaaacatgataaatttattttacttttcctagcactgtccaatgcagcacaagctttgcaaggaatatcaacacacacacacatcaaacagtttttatgcatttattacaagtaacaacatctgcatatgtagattatcttttgttt

SEQ ID NO: 8858 - DNA, 149 bp, Glycine max
  Clone ID: 701101762H1
ctcgcagctccgccacctccacctcgtatctctcataggttattgcaacgagaacaacgagatgatcctcgtctacgacttcatggcgcgtggaacgctacgcgatcatctatacaacaccgacaacccccctttgacgtggaagcagc

SEQ ID NO: 8859 - DNA, 188 bp, Glycine max
  Clone ID: 701101763H1
gcaggaaaaatggagttgttcttctacgcggtgttcggcggtttgggagcggttgttgcagtgacggagctgagcaagagcaacaaggaacgaatcaacacctcttccgcattcaattccttcaagaacaactacctcatcgtctattccctcatgatggctggagattggctacaaggtccatatgt

SEQ ID NO: 8860 - DNA, 195 bp, Glycine max
  Clone ID: 701101764H1
tgacagatcttcaggacagaatcctctaaaatgtgtatgctctgtatttaagagaatctttggagtttgttacatatgccagccaattatgtttcaaatgtaatagaagagttcaatatacaattcttttagaaaataagctgctatattttcaggcttgtcatataggcgggtgtttctattttgtataacagg

SEQ ID NO: 8861 - DNA, 207 bp, Glycine max
  Clone ID: 701101767H1
cctgaatgtggatgtgactgaattccagaccaacttggtcccatatcccagaatccatttcatgctttcctcctacgctccagttatctctgctgagaaggcctaccatgaacagctttcagtggctgaacttaccaacagtgctttcgagccatcgtccatgatggccaagtgtgaccctcgccacggaaagtacatggcatgttg

SEQ ID NO: 8862 - DNA, 155 bp, Glycine max
  Clone ID: 701101769H1
caacaaaactcaataatggcattccagttgaattcgatggttacatgagagtgtccattgatacagaagtgttctttagaggtaaaaagcagcttgaaactttcaatgatttgaccagtgattgcaaggatggtattaatacctgtaatgttgca

SEQ ID NO: 8863 - DNA, 150 bp, Glycine max
  Clone ID: 701101772H1
ggaagaggagcgaaacgaacaaacagcgaactaatcaattgagccacttaccatcagatttagatctcccaacagagagtttctcaaaattgccaagtactcttttcaggatcaaggaagagactcaagaaccaccaagaggtgttgttc

SEQ ID NO: 8864 - DNA, 150 bp, Glycine max
  Clone ID: 701101773H1
cttttccttctctctggctttcctttgacgcttctgacactgctcactttctttctctccgtgtcctaatggctctccccgactcttcttcctgccgcaactccctgatcccctccttcatctactcctcttcctccaaaacgctccctc

SEQ ID NO: 8865 - DNA, 259 bp, Glycine max
  Clone ID: 701101775H1
caagtgatgaagtcccaagacttgccggaaggatgcgtagcacacatattagtcgtacatttgtactcctgaagacatagtcaggctctccctcgtttccaaggccttttattatgcagctgattacgacactgtgtgggatcgttttatcccctctgatttctcatctaccatttctccactttcatcctctaactctaacaaggatctctatttcactatctcagaacgtcacaccatcatcgatcagggttagaag

SEQ ID NO: 8866 - DNA, 185 bp, Glycine max
  Clone ID: 701101776H1
catagatccttcattctctgcaacgatcaaacccaaaaaacactgcacctctttttctgggtacgccactttctcttctttttaatttttttttgttcttctttttcttcaacccctctattcgcaaaggaagcaacggaatcgattctgttcagttttcctcgttttgagtttaaattcacagt

SEQ ID NO: 8867 - DNA, 225 bp, Glycine max
  Clone ID: 701101778H1
cttttgttggtcatgtttgtataggtggctgcatctgcattcggatgcgaaggaatgtccagtttgtaagcgagatgtgacacttacaagtgttaccccaatatatggccgtgcgaacaatgtccgtcgtcctgaggacgattctgcacttaagatccctcccaggcaccaagcgaagagagttgagagtctgagacaaaccactcagagaaatgcatttgcact

SEQ ID NO: 8868 - DNA, 283 bp, Glycine max
  Clone ID: 701101779H1
ctctaacctacctctttttcttctctctcaacaacttcaccttctacctcctcgatcatgtctcacttcaagggcaagtaccatgatgagcttatcgccaatgctgcgtacattggcactcctggaaagggtattcttgctgctgatgagtcaacagggacaattggcaagcgtttggccagcatcagtgtagagaacatcgaatccaacaggcgagctcttagggagctgcttttcactgctcctggtgttcttcaatatctcagtactgtcatcctctttg

SEQ ID NO: 8869 - DNA, 84 bp, Glycine max
  Clone ID: 701101780H1
ggagaagacaagcctcatcctcaggaggaggtcatcgccaccgagtttcagaaagtcactgtctcagaccaaggagagaccaag

SEQ ID NO: 8870 - DNA, 247 bp, Glycine max
  Clone ID: 701101781H1
ctcgagccgcttaaatttctgaacattgaacaactcttcacacaagacaactttactctggcacttgtagcatcatgactggcagagaaatcctccatatgatgaaggtgaaagcagggtttggaacaccagacacagggaatggaaaaggcaaaatatcaacacacattacacatggctttcacttgatgaagggcaaatcagcgcatcctatggaagattatttagtttcagaatttaagcaaga

SEQ ID NO: 8871 - DNA, 277 bp, Glycine max
  Clone ID: 701101782H1
cgcgctgttcctctgtttctcgtttttgtgttcagaccgaaccctagctccgcatcgcaaccatgtcgaccaagcaaggtggaaaagctaagcctttgaagaaacccaagtctgataagaaggattacgacgagattgatgtggctaacattcagaagaaaaaggaagaggagaaggccgctaaaggagttgaaagccaaggcgcaacagacgggaagctttggaggttctgggctcaagaaaagtggcaagaaataagggctctttatcatgattg

SEQ ID NO: 8872 - DNA, 171 bp, Glycine max
  Clone ID: 701101784H1
ctgattttgcttcatctgtacttgtagagcctttttctactgcaaagggatggatgacaagtgctaaataagcactttcttcttcttcttcttcatcccttcatcgccaaacacaatgaaggaattgggagtggttgcaatcctctcttcaatagagttcttggacgttat

SEQ ID NO: 8873 - DNA, 217 bp, Glycine max
  Clone ID: 701101785H1
ctcctctctcaagcttatttcatcgtggatattttcacgtcttgaaggacgtaaaggatgcaattatggaccctaacaacaacgaccatttccaaaatgtccacggaatgcctccttatcaatatatgaagacagacgaagaacttaatcaactatttaacaaagcattggaccaaactgggcctcctgaaatgcgaatgctccattaactatacaa

SEQ ID NO: 8874 - DNA, 198 bp, Glycine max
  Clone ID: 701101786H1
gccggcgcgcgctgaagtttgctaggttcatgagcaggttcgggaagagttaccgaagcgaggaagagatgagggagaggtacgagatattctcgcaaaacctcaggttcatccgctcccacaacaagaaccgcttgccctacactctctctactaatcattttgctgattggacttgggaggagttcaaaagacaca

SEQ ID NO: 8875 - DNA, 274 bp, Glycine max
  Clone ID: 701101788H1
taatagtggagacctcagggttgttcatctctttttctcacttgtttgtttcctcatatttcttggtgttttttaggctttcttgttctgttttgtcctatctaagtgttgatcttaaagggggaaaatgagttacttgggtttgggtgttagtcatggtacagttccagtgtaccatggaacaaaactcaaagtgttggataggagggtgaggataacagagctcgtgttaaggtgtgtgagccttggtctaggagctgttgcaattgttctc

SEQ ID NO: 8876 - DNA, 275 bp, Glycine max
  Clone ID: 701101789H1
cttaattaatcaattaagctagctaccttgattaatttgccaacaagggctatgcatggtgtttcccccgaagaataataacttctatgttgaggagtgctaacgatctgtctatgcagttccctaatttaggctttttcgtcttttcctctcatcagctacagttgttgggggtgtttggaagagaaggccaaaaccatgggggcatgcatcaaattgtagataagcatgcttgtgtccaagggtgtattttgtatcccttttgtgtcttttct

SEQ ID NO: 8877 - DNA, 274 bp, Glycine max
  Clone ID: 701101790H1
gcattttaactccaattggcctgttcccagagcagataagtatggtgtccagccactttccatatggctaccaagcagaaattatggctctggacatcctcatgaaaattctaccaaccataacctgtctgttccaaagggatggcgcaatggggactggatctgtaactgtggcttccacaattactcatcccgctctcagtgtaaaaaatgcaatgcttttccacctgcaattgatgttaaacttcatgctgtttccactttttggtggtga

SEQ ID NO: 8878 - DNA, 196 bp, Glycine max
  Clone ID: 701101791H1
ctgaactctctctctcatctataagtcaacatggctcatcatgaagcattcaagtgcatcgaattcgagtagacctcaccctaagctcaatgaaagaattctgtcatctctgtcacggagaactgttgctgctcacccctggcacgacttagagattgggccaggagttccagcagttttcaactgtgtggttgaa

SEQ ID NO: 8879 - DNA, 254 bp, Glycine max
  Clone ID: 701101792H1
gtcggagttcatcagcttcataacaggagaggcttccgataagtgccagaaggagaagaggaagacgatcaacggcgacgatcttctctgggccatgactaccctgggcttcgaggactacgtggatcctctcaagatttacctgcacaagtatagggagatggagggggagaaaaccgctatgatgggaaggccacatgagagggatgagggttatggccatggccatggtcatgcaactcctatgatgacga

SEQ ID NO: 8880 - DNA, 276 bp, Glycine max
  Clone ID: 701101793H1
cccccgagattccgtgagttgcaaaaatgaagacgattctttccaccgagaccatgaatatcccggacggcgtgagcatcaaagttcatgccaaggtcatcgaagttgagggcccccgcggaaaattggtgcgagacttcaagcatttgaatctcgattttcagctcattactgacgcaaacggtaaaagaaagctgacaatcgacgcgtggtttcgttctcaggaaacatccgccgccattcgcaccgccttgagccacgtggagaatcttatca

SEQ ID NO: 8881 - DNA, 280 bp, Glycine max
  unsure at all n locations
  Clone ID: 701101794H1
tcggaatcggctcggaagccttcttctgcgtgtccgggagaagaagaaaacacctccgagtcaactcggacgagttgcctcatcgtacggtatcgtcctcngactctgtactcttctttcacttccgaaatcaccgttcgcggggttttgctctctctccgttttttgttcagatctcgcattggtttcagctgaaacgacgccgttcaatttccttcgcttaattagggatttatatcttaggtcgaaacttgaagtgatgatggtgtggttgttgtga

SEQ ID NO: 8882 - DNA, 95 bp, Glycine max
  Clone ID: 701101795H1
ctaaaattctggtgaggaagttaccagaaagcaagtatcctgtggttcgattatctgaactacctgctaagcagttggaaaatgataaatctgag

SEQ ID NO: 8883 - DNA, 261 bp, Glycine max
  Clone ID: 701101801H1
cgcgtcgctccgcaccagtttcaccgcacgaatatcttgctgtttggcgcgatccgagaaaaactctgtaaacatgttggtttaccaggacctccttacaggtgatgagcttctctctgactccttccgttacaaggacattgagaatggaatgctgtgggaagttgaggggcagtgggttgttaaaggcgcagttgatgtagacattggtgcaaacccttctgctgagggtggaggcgaagatgcgggcattgatgatgc

SEQ ID NO: 8884 - DNA, 261 bp, Glycine max
  Clone ID: 701101802H1
caacattcagcttcttcagatccgatgttcaatggccccggtaatttgccgcctactcccactcattcagtgtcgaggccggtgtgaaggactaactctggtttaggttaattaggaactccatggtagatttgaaatatctagtttacaattttagttgaaaaatcatgatctggtctcagttactttttgtctccactgtcttttgctgttgtaaaatctaattccatgttcattggatatgcctctattatatcgttt

SEQ ID NO: 8885 - DNA, 246 bp, Glycine max
  Clone ID: 701101803H1
ctcgagccgcgcgcactctctctttttctctctgttttttgttctctcttcgcttaaaccctctcgttcttctcgttttcgccgattctcgccatgccgaaagctaaatccgacgccaaagccgccgatagcaggttgacgcggccgggcgctggtgctgggcggccgcaatcgaggcaagctgctaaggaccctaacaagccgaagagacctccaagcgctttcttcgttttcatgtccgagttc

SEQ ID NO: 8886 - DNA, 258 bp, Glycine max
  Clone ID: 701101805H1
cggcatgtcaccattcttgaccagtcaccccaccagctcgccacggccaagcagacggcgccactcacggcatgcaaaatcatcgccggggctgccgcggctctcccctttcgaactgattatgccgatagatatgtatccgcaggcagtattgcgtactggccggctccacagcgtggcatcacggcggcatacagggttttgatccttggaggcaacgcgtgtctaattggtccggtctacccaacattttggttg

SEQ ID NO: 8887 - DNA, 252 bp, Glycine max
  Clone ID: 701101806H1
ccggtgtccgcctttcccgggtgcatggctcaatcgtcccttgtcatggtctcgactctcctccagctccacaactccctggaccccaccagctccctcctctccaacgccgacggcgcatcctccctcctccactcctcctccgtcgcccctctcctcttcttcaccatcgcctccgtcctctccttcgtcgcctccacgcgcccctctccttcctcggactactctgtctctgccttccgcaccctctcc

SEQ ID NO: 8888 - DNA, 255 bp, Glycine max
  Clone ID: 701101807H1
cggggggataagacgacttgtcggagagtgagtcgggtgtggtcggcgaggcaccaccaccaccaacaagcaaatggctgctaccattggcgttggcgccgcaaaagccatatcaatcgcaatagcagttcggcacctccgaacaaaaccttacgcagcagcaacaacaacagcacttgctcttctttcactccacaaacctctcttcctccctcattcctctcccttctcctctcgccgcgctttttgcgccgc

SEQ ID NO: 8889 - DNA, 254 bp, Glycine max
  Clone ID: 701101808H1
gcgaaatggctaaagatgttgaggttcaagagcaaggcggcgagtactctgccaaagactaccatgaccctcctccagcacctttgttcgacccagaggcgctcacacagtggtccttctatagagccctcatcgctgagttcatagcaacccttctcttcctttatgtcactgtgctcaccattattggctacaaaaggcagactgatacaacggtaggtggcaccgactgtgatggggttggcattttgggc

SEQ ID NO: 8890 - DNA, 249 bp, Glycine max
  Clone ID: 701101811H1
ctgctatcttgtgcagtgcagagtttgttgtgaaacacaatttgccatcacaagctgttgacattcttgctctgacaatggccacagacactgaaacttctttcaaggacagctgtatcaagatggctggttttgacatgcgcaaattggctgcagataaagcttacaagattgctggcgtcaccgctaacgatgttcaagttattgaacttcacgattgtttcagtgcaaacgaactcgttacatacg

SEQ ID NO: 8891 - DNA, 251 bp, Glycine max
  Clone ID: 701101813H1
gcaattgcctctttcaagacgcatctgcgtgtttactattttgtactatatttatatatagtcactcaagcttctaggatttctgcctgctgcatccaaatgggcagcaacttgcggtttttgagtctttgcctcttggcattgattgcatcaactcatgctcaacttcagcttggttttcatgctaacagttgcccaaaagcagagcaaattgttttgaactttgttcatgaccatatccacaatgctcc

SEQ ID NO: 8892 - DNA, 254 bp, Glycine max
  Clone ID: 701101814H1
acgacaattttgtgggacgcagtgcctctacaatccccgaaactgatgataaaaaaactctggctgacaatgatatgggcagaagtgccactacagttcctgaaactgatatccaaaaaactttgcttgataatgttacaggaagcagagacagtgaaaacaatttgcttgacactgttacaggcggcagcgacagacaatctcaagtacgatcaaataaaccccagagaaagaacgaggtcaaagtacctatg

SEQ ID NO: 8893 - DNA, 252 bp, Glycine max
  Clone ID: 701101815H1
gataaatatagggacagacagacaaaccgaggctttgctcaatttcagtgaagaaagtgaaagatgggtaatcgtttcatctgcatgacgaagaaggagtcgaaagatgttggatcgagaagcaagagaatgggtagatcacagaggaagctggtgagtgcggaagagctgcatcttcaggcactttctatggcacttcaacagcatcaactgtctcagaggtttgaaggctccatgtctaggagaattggc

SEQ ID NO: 8894 - DNA, 252 bp, Glycine max
  Clone ID: 701101816H1
cggttcgattagcattattgctttgtgctgtgatctaccttgcaataggcttatttgggtacatgttatttggggcttcaacccagtcagacattctcatcaattttgaccagaatgctggttcagcagttggttccttgctcaatagtttggtccgtgtaagctatgccctccacatcatgctggtgtttcctctcttgaacttctctttgagaaccaacatagatgaagttctcttccctaagaagccta

SEQ ID NO: 8895 - DNA, 254 bp, Glycine max
  Clone ID: 701101817H1
gtcactgctttgtttagatcagaaccagatcgtgttctcttcttccattggcaaacatggcaactcaaatgcgcaagaagcgcaagtttgtggcggatggagtgttcttcgccgaactgaacgaggttctgacacgtgagttggcggaggacggttactccggcgtggaggttagggttacgacgatgcgcaccgagattatcatcagagccaccagaacccaagccgttctcggtgagacgggacggcgaatt

SEQ ID NO: 8896 - DNA, 259 bp, Glycine max
  Clone ID: 701101820H1
ccaaaacccaaaaacctttccttttactttttctcaaactgaaacataaaaaatggcgggtcttattccttttgtttacaaggctatcatgcaatccaagggcgacaacgagggtcatcctataggatcatggctttgtgagtctccttactcatacatgagacttcctggtgactcgggtaggtttcaaattcaagcaccagctgctgcttcaccctcttccaccaaccctaattcttcttctgctacacaaatcatt

SEQ ID NO: 8897 - DNA, 215 bp, Glycine max
  Clone ID: 701101822H1
gtgatcctcttgttgacttgataccaatttatttcgctgtgtttcgcggtgattcttatctccttaagaagtttttagaacgctacaaacttccttttgctcgtaacatatcaagatatgcgtcaacagcgggtgctcaaacgttcggccgactttcatatgttgccatgtgctattgtatcttgcatgatgacaatgtcttgggagctcttttt

SEQ ID NO: 8898 - DNA, 250 bp, Glycine max
  Clone ID: 701101823H1
gcaacatggttttgtcatggacaaaagggagagtgttccggcgtgccagacaggggcaagagttgaaaaatttcggtggcgacttggagatagacattgcgatccccacccacttccggtgcccggtaacattggacatgatgaaggaccccgtgaccgtttccacgggcataacctaccaccgcgacagcatcgagacgtggatcgagtccgggaaccgcacgtgcccggtcaccaaaacggagttgac

SEQ ID NO: 8899 - DNA, 258 bp, Glycine max
  Clone ID: 701101824H1
cgtcacaaccgaaacagtttccatctctctcacaaaatgacaacaatatcaaattgctcccttctcttcctcttcctcttcctctccaccctccacatagcttccaccctctcaacccccaccaacttcctcacgtcctcctgcagcaccacccagtacccagccctctgcatccagtccctctccgtctacgcctccaccatccagcacgacccccacgagctcgtccagacagccctctccctctccctcaaccac

SEQ ID NO: 8900 - DNA, 251 bp, Glycine max
  Clone ID: 701101825H1
ctcctttaagcacgtaatcttagataaaaccccaagattcatatatatgggggccaatatgcgcttgacagggttttagcttacttctgacaatacttcttggaaaaaaaacagttcgataaaacccttcacatgggcagcaagtcctcgatcgcgttcttcctttgcatttgaaagttgaaacatctaatcgctgaaacatggcacctatctgtctttttgtcgtatacaactaattaagaggcctatgg

SEQ ID NO: 8901 - DNA, 252 bp, Glycine max
  Clone ID: 701101828H1
cgccggcccgcatcgggcggccgccggtgcctgcgcggtcctggcccttgagcgtgtccccgccgacatccgtgcccagggcggcgtggcccgcatgagcgacccgcagctcatcaaggccatcacgcgggccgtcaccatccccgtcatggccacggcccgcatcggccacttcgtcgaggcccagatcctcgaggccctcggcatcgactacgtcgacgcgcgcgaggtcctcaccctcgccgacgacgc

SEQ ID NO: 8902 - DNA, 254 bp, Glycine max
  Clone ID: 701101829H1
cgcggttttccaattcacagagcaacacaacgaaccaacaatggcgcacctcagccgcagtcgcagccgcagcacgggcaagcagcgctggcgccggtgcagtgcttcggtcgcaagacgaccgccgtggccgtgacctactgcaagcgcgggcgcggtctcatcaagatcaacggctgccccattgagctcgtggcgccggagatcctccgcttcaaggccttcgagcctatcctcctgttgggtaagagccg

SEQ ID NO: 8903 - DNA, 251 bp, Glycine max
  Clone ID: 701101830H1
cttcccttgcaccctggttttcctatcctagccggactgctattcgtcgcaggttcaatttagagggcagttgcgaacacttaatagatcatgcgggtgctgcggaagcattttggaagatgcggtgcagcgtgaacattgtgcgtcagcatgtgacttggcaactcatgtcttctgtcatgtatgtgctctttgtcaagaaggtcgtgagctccgtcgtaggttacctcatcctggctttaatgctcaac

SEQ ID NO: 8904 - DNA, 243 bp, Glycine max
  Clone ID: 701101832H1
gtttttgaattattcctcttttccgtactctcctctttggtctttaccttaacacgcgcacacacacacacacacgaaaaaaaaaaatacaaaacaaaattgttgtagtagttttgtaccttgtgaattactattagatcacgcacttcgcaccaaaaaccacacctatttccttcaatttagcctcgattcttccgccctttgttcaaaggagaatattctatttatttatttatttatttt

SEQ ID NO: 8905 - DNA, 261 bp, Glycine max
  Clone ID: 701101833H1
cgccggcatctggcttccttaagctcctcattagtcctgctccttgccgctctaattctatcccctcaagttcttgctgactatgagacgcccccaatttacaagccacctgtttacacaccgccagtttatcagcccccagttcctcaaccaccagtgtacaaacctccagtttacaagcctccagttgcacaaccacctgtttataagcctccagtttataagccacccatttacaagcctccagtgtatacacctcca

SEQ ID NO: 8906 - DNA, 254 bp, Glycine max
  Clone ID: 701101834H1
ctttcttgcacctaaggtaagcaatcaagaaggattagcagcagcagtggaagcaacggctgctttactgaacaacgctgtgaagccagtgattgtgggtgggccaaaactaagggtagcaaaggcacaaaaggcctttctggagtttgcagaagcaagtggatctccaatagcagttatgccgtccgggaagggactagtaccagagcatcatccacatttcattgggacatactggggtgctgtcagctcta

SEQ ID NO: 8907 - DNA, 257 bp, Glycine max
  Clone ID: 701101835H1
tgattaacgagaatggacaaggcagtggcgcttggttcccttgaaggtgaaatggccacccagcacatttcacaaccacagaagcgcaagggtggtcttgttaccatgcctttcatcattgcaaatgaggcacttgcgagggtggcaagtctgggccttttgcccaacatgatactgtatttgatggggacctaccggcttcaccttgcccaagccacccagatacttctctggtcccatgctaccagcacatttca

SEQ ID NO: 8908 - DNA, 259 bp, Glycine max
  Clone ID: 701101836H1
ccctcgagccgaatcggctcgagatcgtattctgcaaattcaaaccgacgtcttggttttctgaacgatgggcggtggcacggcaccgcatcatgatgaatctgacaaaggcattttttcacaccttgctcatggggtcgctggtgcagcacatggtggacatgggtacccacctggggcttacccaccaccacctggggcataccctccacaacacggatatcctccagctgggtatcctccacaacaagggtatcct

SEQ ID NO: 8909 - DNA, 256 bp, Glycine max
  Clone ID: 701101837H1
gttccttctccttgtgatcttcttcaaccttcagcgtgagaaaacacattcagaaaccacgtttctctcttcttcttcttcttcttctttttcttctctcgaggtcattattaagtattcaccatggcggcaccatctcccaccaaacccaacgacccaacaaaaccttccaacacttccaccacccttagtctggaggccggcccggcccaagccagcccactccgaaacatgtttgccgtggcgtccatcgccg

SEQ ID NO: 8910 - DNA, 252 bp, Glycine max
  Clone ID: 701101838H1
gaaagttagaaaacatggcagcggtggccggagcatcctcgtccgtgattaaggtggctgcactttccggatctttaaggaaaggctcttacaacagagccctcattcgttctgctattgagctaagccaaggtcgagttgaaggccttcaaatcgagtacgttgatatttcgcctttgccccttctcaacaccgatcttgaggtgaatgggacctaccccccacaagttgaagcctttcgccagaagattc

SEQ ID NO: 8911 - DNA, 257 bp, Glycine max
  Clone ID: 701101839H1
cggtggtgttgccgttgcaaattgcaacactcagcacaacactgcaccacttttgtttctgcattgtgtttcccagcttagctacaactacaaacaagcccacgtcgctttcataaaaccacacccacctgccaccatcactttccccaaaacccaactcatcaaaacttaaactcagcgcgcgcgcgcgcgcgcgcgcgcgtaacgacatgcgtgaagacgctaaaaagcaacttcgtcggcgctctaacggcgag

SEQ ID NO: 8912 - DNA, 252 bp, Glycine max
  Clone ID: 701101840H1
ccctcgcggcgaatcggctcgagcggctcgagttttgctttctcttccctctcaattttctctaggtctctctttttatttttacgatctctgacctaattgtctctcttctcttctcttctcatattaccactcatctccagccacaacccagagcacaccccccaaaattccgtgggtatttctcatcttcttctgcccccatcacctagatctgtctgtctatacactcattgtttgacaaacaaagaa

SEQ ID NO: 8913 - DNA, 249 bp, Glycine max
  Clone ID: 701101841H1
ccacaattcacaatcaatcacatttcacaggcatgtcttttcaacaaagttcattctacccacgagtcgattcaacaaacccagacgctaattctcccttctctatccccgcaccatcttcttcttcttcttccatttatccctcagtggccccaacagcgcatctcatttgggacgcgccaaacacgactacagaagacgccatggcaaacgttctggtcacggtcccgggtgcgcttctgcatctga

SEQ ID NO: 8914 - DNA, 249 bp, Glycine max
  Clone ID: 701101842H1
caaaagcaaaaggcaagaatatcaacaaggtaaagtagattccttactagacatggcgttgaaggacacattctacatatctcatggatcaccaactttgtccatagatgaatccattcaggccaggcagttccttcagtcatggaagacggacgtgtttcctcaaagaccctcttcaattcttgtcatctctggtcattgggaaaccgcagttcccacggtcaacgtcgttgactccatcaacgacac

SEQ ID NO: 8915 - DNA, 246 bp, Glycine max
  Clone ID: 701101843H1
cgctcgagccgaatattttctgcgcgacttttgctagacaccgttagtgggtatcctcaaaatactagattttcgattcgtttggtgaccggctttttaggtgtgattatcacgtttttctttttgttcaacaagctatggaggtttcggtgattggacgctcacaagcgaagctgggcgcgtctgacttggcttctcgggccgttggattttgtaatctgaagacacatttcagggttttgaatg

SEQ ID NO: 8916 - DNA, 250 bp, Glycine max
  Clone ID: 701101844H1
cgggaatcgcttgggccttcggtggcatgatcttcgccctcgtttactgcaccgctggcatctcagggggccacataaacccggcggtgacatttgggctgtttttggcgcggaagttgtcgttgcccagggcgattttctacatcgtgatgcaatgcttgggtgctatttgtggcgctggcgtggtgccgggtttcgcggggacaacaaaatacggtgcgttgaatggtggtgccaactttgttgcccc

SEQ ID NO: 8917 - DNA, 251 bp, Glycine max
  Clone ID: 701101845H1
cgcgcttacgaaaatgtggcagagaacgggttttgaagcagaagcagttcacttgatcaactcagatttcagggacctaagtctagctgctaatagactcgcccatcatgccatcaaacttggtggcattggctttggagcctcttttttcggattgtttgctgccattgctgctatttatctgttgattttggatcgtacaaactggaaaacaaatattctcacagcactactcattccatacattttct

SEQ ID NO: 8918 - DNA, 246 bp, Glycine max
  Clone ID: 701101846H1
gcgatccgcgacaaactctgtaaacatgttggtttaccaggacctccttacaggtgctgcgcttctctctgactccttccgttacacggcaattgcgcatggcatgctgtgggccgctgcggggccgtgggttgttaacggcgcagttgctgtcgacattggtgcaaacccttctgctgcgggtggcggcgcagatgcgggcgttgatgatgcagctgttacggttgttgacattgttgacacatt

SEQ ID NO: 8919 - DNA, 249 bp, Glycine max
  Clone ID: 701101847H1
gcattatatatattttgaatataagacattaagaacatgcttgagaagcaaaaggtggttggttgtaaagtgtccattgtcattgtcttttccttttatgaaaagaaaaaaaaaaaactttactagacatgaaaaatttgttatatataaatagttactgatgaatcttctagttttgcaaagcctgaagaatttaaatattagacgtgcaattggcgtcagaaacgctgcattcttgtccattactct

SEQ ID NO: 8920 - DNA, 258 bp, Glycine max
  Clone ID: 701101849H1
catcagtgcttgaagatatcattagttgctgtgttagtaaaggatatgtctttcaaatggaaatgatagtacgggcatccagaaaagggtaccatattgaagaggtcccaatcacatttgttgatagagtatttggaagttcaaagcttggtggatcagagattgttgaatacctaaagggcctagcttatctcttggtgacaacataaaaggataaatcataacaactcgatataccttacattttggggaagaaaa

SEQ ID NO: 8921 - DNA, 257 bp, Glycine max
  Clone ID: 701101850H1
ccgtcgagccgaatcggctcgagccgaccgatagcgaacgagtaccgcgcgggacaggtgcagaccagtatttcatgcaggaaaccgacaaggctttggagacatatcgggcggggttgcaatatgactctaacaaccaggagttgcttgacggcatcagaacatgcatacaacaaattaacaaggctcgccgtggagacttaagtcctgacgaattgacggcgcgacaggccaaggcaatgcaggatccagaaatt

SEQ ID NO: 8922 - DNA, 259 bp, Glycine max
  Clone ID: 701101851H1
cgctgagttactacaatcagcagcaaccacccgtcggtgttcctcctccccaaggttacccaccgccggattcttacggaaaggacgcgtaccctccgccagggtacccgccgcaaggcggataccctccgcaggcgtatccagcacaggggtaccctccaccctacgcgcctcctcagtacgctcagcctccgccgcaacaacaccagaattcatctggcccaggttgcttagacggatgtttggctactctctgctg

SEQ ID NO: 8923 - DNA, 256 bp, Glycine max
  Clone ID: 701101852H1
gcttcgcgttcatcactgggcagtaaaaaatgtctgacacagcagaccatgcagcatcagagtattccaatggtgacgaatcccctccaaagcccagacagaggttcagggacagatctaaggcgatgctgtccaaacaagctgtgcagaccaagcaaatgctttccaaacaggccgttaagcttgccaaacaagctgaagaacacgaaaggttcatcaacaaggtgacgcatctcgtgggggtcctcggttttgg

SEQ ID NO: 8924 - DNA, 256 bp, Glycine max
  Clone ID: 701101853H1
cttgttttgtcatctaagacaacctagtgagagtaagcacacattgctcagcaacaatggcagcctactcaagccatgctttgaaaaccatccctttttcttcctttgtgaagcctgtcagtaccaaaccaacatcattcttcacaccttcacctaccaaacctttcttacccttcacctcaccaaaccactctctcaccaaaaatctcaagctgaactccactttgccacacttttgcttgtcttcagttcccaa

SEQ ID NO: 8925 - DNA, 249 bp, Glycine max
  unsure at all n locations
  Clone ID: 701101854H1
cgcacagttcctcaagtatccaccacccanagtgctccaggtggataagtctgnatagatgactgatgaagtctttgcaagaccaacgattgctggtttaaatccaaatgtcattaagattatcgaggagttcccactaagtagcaagccagatactcaagcctatggtgatcatacctgtataatagcaaaagaacatttggagcctaacttaggtgggctcactgttgagccggctatccaaaacaa

SEQ ID NO: 8926 - DNA, 253 bp, Glycine max
  Clone ID: 701101855H1
cgcgccgcgatggcggtggccgcgtccgacgccgacgacatcctgatccgtcaggtggtgccagatgttggcgaaccggcgcggcggacaacctgctgaacgccgagcaccacttcgcgagcttcaaggccaagttcgccaagacctacgccaccacggcggcgcacgatcatcgcttcggcgtcttcaagtccaacctccgcagagccaggctgcacgccaagctcgacccctccgccgtccacggcgtcac

SEQ ID NO: 8927 - DNA, 250 bp, Glycine max
  unsure at all n locations
  Clone ID: 701101857H1
cgctaaaacatctcaatgggttcttcttctattacaacatcgcccccaancatgaccatggctgcgatcgtgctcctgttcacggtctttgccgtttcctccgccctagacatgtcgatcatctcgtacgacagcgcccacgcggacaaggccgccacgttgcgcaccgcggcggagctgatgtccatgtccgcgccgtggctcgtgaagcccgggacggtgtaccacgcgctcggcgcgacggcgaagc

SEQ ID NO: 8928 - DNA, 248 bp, Glycine max
  Clone ID: 701101858H1
gttcgatgcactataacatggggcagcaagttggctttgaggatgttctaagatactttgacgaagatggtgatggaaaggtttcgccttcagagctgaagcacgggctcggcatgatgggtggtgcgcttccaatgaaggacgctgcgatggcaattgcggcattggattctgatggcgatgggttgccgagtttggcggatttcattgctctcatggaagctgggggcgcggcgcagaagttgaat

SEQ ID NO: 8929 - DNA, 249 bp, Glycine max
  Clone ID: 701101859H1
cggcgccgaagtggatggtggcggctgcggcgacaacggcggcgaagcataatgagaatttgagcagcgaggggcgtttggaggacgatgattcgtggagagtcagaatcttcaatgggcgcaggggccagtaggggcggatcgtgttcgtgtcgtggtgtttgaggaacacgattgggtttttgtggggacctatgatggtttcagtggacctgatgtacttgattaccttctctccaatctccacac

SEQ ID NO: 8930 - DNA, 246 bp, Glycine max
  Clone ID: 701101860H1
tctgaattgatacaaagcgtgcgagcaatagctggcgataagttgctagttgcggccatcaaatcttatagagacaacaagcagaaaccaagctttctacaatcaaggtcaaagaatggcttagcaacgcggataaaataactttcttcacacgagttctttttcttgggttgacataatactaaatacccaaacttacaaggcggacacacaaaactgctttaaaagcagtgtggcatatttgac

SEQ ID NO: 8931 - DNA, 248 bp, Glycine max
  Clone ID: 701101861H1
gtgacggcgttggtgaagctcgtcaactaccagcacctcatgcccacgcgctacacgcttgacgtggacttgacggacgcggttaaccccgacgttctcaacgctaaggctaagacggccactgctctcaaggcgaccaagaagctgctcgaggcgcggttcaaaaccgggaagaaccggtggttctgagcggccagcatacatgttcaccaatgaccaaaggcaacaagaacgaactgggcgatatg

SEQ ID NO: 8932 - DNA, 251 bp, Glycine max
  Clone ID: 701101862H1
cggttcttccacgtaacgcgattttcggtgcacccgcgtggtactttttcagccccagcgacaggcaatacccgaacgggtctcgacccaacagcgtagctgggtcgggttattggcaagccaccggaaccgacaagatcctcaccaccgacggtcgaaacgttggcataaaacaagccctcgttttctacgttggcaaagcccccaagggcaccaaaaccaattggctcatgcacgagtatcgcctcctc

SEQ ID NO: 8933 - DNA, 246 bp, Glycine max
  Clone ID: 701101863H1
caaacgatacgttttttttggacaagatgatgggacccgcaaatatctttattatttttttgtcgtaaaagtcagcatttgtgtgcaattgcattgcacctaacattttgtggactaggccaagcttagtaaactattcttattctttgttctagagagatcagggcatgtggaattcggttgccctgcgctcgtatttggcttggctcttggtgtacagcgaacaaaaaaaaaccgggggcccgg

SEQ ID NO: 8934 - DNA, 245 bp, Glycine max
  Clone ID: 701101864H1
cggcgctggcgcgtggcgggcactccaacgaaggttctcgaagaatctctctggctgttggcggcggcagcgttcgggcaagtcgtggtggatttgggcgaattttccgcaatttgtttgggcgccttggggctttgactagaagccgtagcctttcaacttcactcttcaatagacgccgcagtactagaacctgggtcttgggaaattgatttggatggcgttggttttggaaaacaagcttt

SEQ ID NO: 8935 - DNA, 257 bp, Glycine max
  Clone ID: 701101865H1
cgcacgtctctctctctctctcgccatggctatggctatgcaaagcggaatcggagtctccaagatcctcatcatagcaggcgcaggttacaccggcaccgtcctcatcaaaaacggaaaactctcggatttaatcggcgagcttcagttgctggtgaagggcttggcaaaatctggggcgcatgctgaaggtgaaggtgaatatgctgatgccatagctgctcaggtgcgtcgcctggcgaatgaagttcggcagc

SEQ ID NO: 8936 - DNA, 254 bp, Glycine max
  Clone ID: 701101866H1
ctcgagccgttcctccttaatttgaggttaatattcccaaaagacgcgagagcgagcgtatcgctcatccttattacaaggactgggcacgttaagcttcacaattcattcacattcacattgtagctccgttaacaagattcactttcatctatccactcactaacgtgatcacacactcatcatcatcaataatggcggagttgttggcaaaggccaaaacatatgttgcggagaaagtcaccaacatgccc

SEQ ID NO: 8937 - DNA, 254 bp, Glycine max
  Clone ID: 701101867H1
tgggaccaatcttctcaaactagggcataatgagagagaaagacatttacttggaagtgatggggtaaatggcaagatgaatctgaagcctattatatatttccagagttggagaattggcattgtatttttctttcttggaaattgccttaatttcatttcctttgggtacgctgctcagtcacttcttgcagcgctgggatctgttcagtttgtatctaacattgccttcgcttactttgtcttgaacaaaa

SEQ ID NO: 8938 - DNA, 253 bp, Glycine max
  Clone ID: 701101868H1
cggctcgagattggactgggaagcaattgggaaaattcttgcacgaggtcatagtcgtgttcctgtatacagtggaaaccccaaaaatataattggcctcttactagtaaaaaaccttcttactgtaagagctgaaacagagactccagttagtgctgtttccatccggagaattcctagggttccagcagatatgcctctatatgatatcctcaatgagtttcaaaaaggcagcagtcatatggcagctgta

SEQ ID NO: 8939 - DNA, 252 bp, Glycine max
  Clone ID: 701101871H1
ccctcgagccgaatcccctcgagccgctcgagcggctcgagctctaacctaatcaaatcctctcacctcaaaccaattcccactactcctctacacgcctcccctcaggaaccaatgtccataatcaccccacgccgtcatcctcaaacgacacccttccgctagcaaaacgactgcggtttggtcgtcgtcttccccgaggcatgctcttgggatattattcttcatcatcgtaatcacaccctacagaga

SEQ ID NO: 8940 - DNA, 250 bp, Glycine max
  Clone ID: 701101872H1
cgcacactactctttgtctctgtcttgtgtgtgtgcgagacatggcgatggcaatggcgcttcgcaggctttcatcttcaattgataagcctcttcgccctctcttcaatgcgggttccctctactacaagtcgtctttgcctgatgaagctgtttacgacaaggagcgacccggagttacatggccgaagcagttgaatgcttcacttgaggtcgttgatcctgagattgctgatcttattgagcttga

SEQ ID NO: 8941 - DNA, 249 bp, Glycine max
  Clone ID: 701101873H1
cttgaatatctctcacaacaacctgtcaggttctatccctgactcccttagtgaaatggtgagtttgtcagccatcaacctctcctacaataatttggcgggtccagttcctgacggtggcgtattcaattcttctcatcccctggatttgagcaacaacaaagatttatgcgggcatattcaaggtttgcgtccatgtaatgtttctctcactaaacctaatggtggatcaagtaacaaaacgacggt

SEQ ID NO: 8942 - DNA, 245 bp, Glycine max
  Clone ID: 701101874H1
ctcgagccgctaacctccagcatcctttggtttgcattgatgttattgaagcaggaatagtagctggtcctcgtgcaggactttggaaggcagctgaagcatttgacggacttgtaaggtcagatacttgcaaaagcttagttcacgtattttttgctcaaagaggaacatccaaggtacctggggttcaggattgtggtctggctccaagacaagtcaagacggttgccatcattggtggcgga

SEQ ID NO: 8943 - DNA, 248 bp, Glycine max
  Clone ID: 701101875H1
cggttgagcattacatgcgcaaatacactacaggggctcgcgtgcgtgcgagtacttgtggcaacaaatgcaccaaggcttgcacgtgtgtgggttctttctaccacacggcgaattcacggtgttgggtcgcttatgatcttcaaacccttatcagcggggccaattcctcacatgtggggtatattacggtgcctaataagtaaaatattaaacccttgatattgcggttttatacagttttactt

SEQ ID NO: 8944 - DNA, 247 bp, Glycine max
  Clone ID: 701101876H1
cgggacagaggagctctcgttgagttctatgctccttggtgtggacactgcaaaaagcttgctccagaatatgaaaagcttggtagcagcttcaagaaagccaaatctgttttaattggcaaggttgactgtgatgagcataagcgtttgtgcagcaagtatggcgtctctgggtacccaacaattcagtggtttccaaaaggatctcttgaagccaaacagtatgaagggccacgcactgctgaat

SEQ ID NO: 8945 - DNA, 248 bp, Glycine max
  Clone ID: 701101877H1
ccctcctctcactttcatttctacatccctggctctgttccgtcgatgccgatggcgtttcgggtgcgaaaccctgacctccgctttctcattcttctctctctcttgtccatcacttccgccaaggtcttcttcgcggcgcgtttcgatgacggatggggcaatcgttgggttaaatcagattggcaaacagatgagcacctggctggggcgtggaaccacacctctggccaatggcatggcgacgc

SEQ ID NO: 8946 - DNA, 243 bp, Glycine max
  Clone ID: 701101878H1
ctcgagccgatttccctgtctctgttctcttcaccattctctttcttctttgtttcaagtttcaccaacccagattcactctctctctcgtaattttctctcttattgaggctagaaaaagcgcgcaaaaaaactaaaaaatgcctgcggtcggaggtataaacaccggcgggggcacggcgtaccctggaagcctcactctatttgtgccggtaacatgtatagttgcagccatgggtggtt

SEQ ID NO: 8947 - DNA, 244 bp, Glycine max
  Clone ID: 701101879H1
cttcttggacgctacgcggcgccggcgccggcgccgattggtggtggcgtggcggcgtttgtttacacgtctatgcttgaaaaccctaagcatccttatttttataccgttagcttaatcggaatcgccgtcgggaaacggactattccggcgccggagctgctacggcgggtgcacaatcgaggtgacggcggcgtggttgtggcctccggcacgacgttcacgatgttgccggcggggtttt

SEQ ID NO: 8948 - DNA, 246 bp, Glycine max
  Clone ID: 701101880H1
caagaaaaacacactcacacacagtgcttgtttagactagtgatcttccatggctgtgaaggatagaatcctggtcttgggacccacaggcgccattggccggcacatagtttgggcaagtttaacggcagggcatcccacttttatattggttagggccacccctgcctctgttcacaagccaaggcttgtcactgctgctaatcctgaaaccagggccgcactcattcagagcttccaaaattc

SEQ ID NO: 8949 - DNA, 259 bp, Glycine max
  Clone ID: 701101881H1
cgctcgagccgattcggctcgaggcaggatcattccaatatgggcaaacgaattgttatgggaactctcccttctctttatctctactcttcatcttcagctttagtttcttggaggctcaaaaggctccagcagtttatgtgtttggcgactcacttgttgatgttggcaacaacaattacttgagtctctccattgacaaggcaattcttcctcactatggcattgattttccaactaagaaacccactgggcgatt

SEQ ID NO: 8950 - DNA, 253 bp, Glycine max
  Clone ID: 701101882H1
gtttattccttctttcatccattctactttcttttcctctcgctagtgtttagtgctaggtgattgattaacttagaaggactttgtgtgttacaagaaaacaagggcaagtttcatgtctgaatttgacacgaacatcccaactgcttttgatccctttgctgaggcaaatgctgaggactcaggtgccgggacaaaagagtatgttcatgttcgtgtacaacagcgcaacggcaggcaaagcctaacaact

SEQ ID NO: 8951 - DNA, 252 bp, Glycine max
  Clone ID: 701101883H1
tgaaatctgaagctaagtttcgttgccactgaggaatgaaatggccaatggtaacaacattagtcatttcttcaagctcttgcttttccttctaactttccactcttgtctcgctgagattttcttccaagagcgattcgaagatggatggcagagccgttgggtgctatccgattggcaaaggcgcgcgggaaaagcgggtaccttcaagcacacagcagggaaatggtctggggatcctgatgacaaagg

SEQ ID NO: 8952 - DNA, 253 bp, Glycine max
  Clone ID: 701101884H1
caagtcccctattacattacaattcaccattaatattctcttcatcatatactttcccttgataataatttcttggttacatcaaggtacatattttctgttcattcattaactcatctgcaaacatggccgataagcaaccccacttgaacggcgcttattacggtcccgccattcctccggcggagcaaccacgctaccgccctcacagtcaccgcggaagaagctgctgttgctgcctcttcggaatctt

SEQ ID NO: 8953 - DNA, 252 bp, Glycine max
  Clone ID: 701101885H1
gtttcttttaagatatttttggtcacatagtttatggtctgcctctgcgtagtgcttcaacagccccctgctcgctcgatcatcttgattattttttaagccttttaaatgcccaacatcttgttcttgatgtttgagcttgatgtatccaattcttagtgaaatcttcttttccgggtgtatgatcaattctactgtgagacgacgcaggacccatttagttcaatccttctccgttgcttttctttactg

SEQ ID NO: 8954 - DNA, 250 bp, Glycine max
  Clone ID: 701101886H1
ctttaagagtagctctaagaagaagaaaaacaaatatgaaggttgtgtacttccttgttgccatcttggctttgacatcctctcttgtctctgcctctgaccctagtcctcttcaagatttttgtgtggcagccaaagaaaaagctggtgtatttgtgaacggaaaattttgcaaagaccctaagcttgtcaaacctgaagatttcttcctacatgtggcaaccgggaacactgacaacccaaataatgc

SEQ ID NO: 8955 - DNA, 250 bp, Glycine max
  Clone ID: 701101887H1
cacgattgggattcagctctttgctctatggcagccgaactacgtgtgctaacttcaactttacctccgctgcgtagaaggcaaacgtttcaataattagcattatctcattctctcattcataataaatgccgcctgcggaatttaggttgagcttcgcaactacgagtttcaaataaactgttaaacacaagtattttctatttccttttgatacatacagggttcatgtttttcactttggataagc

SEQ ID NO: 8956 - DNA, 242 bp, Glycine max
  unsure at all n locations
  Clone ID: 701101888H1
ccgcaaactcattctctctgcgacaggcttttccttctctccaagatggtcggcgaacacagtacgacgtcaccagcctccggtgatcacaaaataccacttcttcccgttcacgagccagtggcaggaanacatacaaacatctccttcagcaccaaatcgattccaacactacaaaacttctacgtgattctgggacctatgctgtctcttttcatatgcctcttcgtgaaactcgacgc

SEQ ID NO: 8957 - DNA, 249 bp, Glycine max
  Clone ID: 701101889H1
ccagtatggagatcccaagcaccgcaacactgatgttaagacggctcttgaaagtgctattgagcagaatatggtggtgaaacagaatttaggtgctttgccgttgtatgttggtaagaatgataaactttggaaatgtgtaaatcctttaggtggtactcctaagcagcactcaaaagcacacatgggatgaaattgacaagtttttaacaactcctgctggaagatcagcactaatgggtacacagt

SEQ ID NO: 8958 - DNA, 247 bp, Glycine max
  Clone ID: 701101890H1
tagagtttaagcagtgaataatgcaccctccttgatttgtaaggattatatgttatagactagagaataaattactatgtagagatcttaatctatctggttcagagaaagcagcgatttgactaaaaatcttgagcattgttgcttattctagaatctagatttagttgttagattttgtttttgtagctcctccgtgaatgatgagaaaataagagttttgatgtgataatcttaaacaggtgtg

SEQ ID NO: 8959 - DNA, 247 bp, Glycine max
  Clone ID: 701101891H1
cgccttatcgctgtggttatcatcttcttcttcctctttcttagatctcttctttctctacgccgcacgccgaaaccatggccggacacggcgcgggtcctgctctcggcatcgatctcggaaccacctactcttgcgtcggtgtgtggcaacatgaccgcgttgaaatcatcgccaacgaccacgggaacagaaccacgccgtcttacgtcggattcactgacaccgagcgtctcatcggtgatgc

SEQ ID NO: 8960 - DNA, 248 bp, Glycine max
  Clone ID: 701101892H1
ctcaccactttcaatatctcagtagttgtgcatggtactgttgctgagaagacattaaattgtgaattagatccatatgaggtccctaagagcatgggcatattccacttgctcgaaagcccaaaagatatcactactgccacagtagcccaaaggataatggctaatcatgaagcttatgtgaaacgcaatgctaagaaaactaggcgtgcgcagagatactacgaagagaaaaaatacgtctctgg

SEQ ID NO: 8961 - DNA, 229 bp, Glycine max
  Clone ID: 701101894H1
gtcgcactttgcgttttctgcgtcatctccgattccccgacaatggccacccaaatgagcaagaagagaaagttcgtagctgatggcgtgttcttcgctgaactgaacgaggttctgacaagggcgttagccgaggacggatactccggcgtggaagttagggttacgccgatgcgcaccgaaatcatcatcagagccaccagaacccaagccgttctcggtgagacgg

SEQ ID NO: 8962 - DNA, 244 bp, Glycine max
  Clone ID: 701101895H1
cttggtctatcagtattcttcctgactgcaaaactgttgtttacaacacagcaacggttggtaacagctggctgaaaaagatgactccagtcaacagtgcatttgcttggcagtcatacaatgcagaacctgcctcatccagtcaagctgattccattgccgcatcatgcctttgggcgcaggtccacgtgacccgcgattcctcagattatttgtggtatatgcccgatgtctacattaatgc

SEQ ID NO: 8963 - DNA, 249 bp, Glycine max
  Clone ID: 701101896H1
cggcttgagctctgcgagatcttgagtcgccgatttgaaaagatgcgtaagcttcagagtgatgctttgcgtgaagccatctcaggaatcatggccgattgcaaggcgaagaatcgcaaatttgtggagaccatcgaactccaaatcggtttgaagaactacgatccacagacggacaagcgtttcagtggctccgtcaagttgccccacatccctcgccccaagatgaaaatttgcatgcctggtgat

SEQ ID NO: 8964 - DNA, 277 bp, Glycine max
  Clone ID: 701101901H1
aggctcgagcgttggttcgcaacaatggcgatgaggagattctacaacgagatcaagggaccgagggtgagcgaggttccggagcacgtgaagccgatgctgtcgctgaactacatcaagaaggcgattcagagaggcttcgataattaccatgccaagtacattgaaaccagctcccccgatcccatcttccatgtctgctacggcggcatgatcttctcctacctcgttgctctcccccacgagcgccgccacctccagcacgcccagcagcacc

SEQ ID NO: 8965 - DNA, 82 bp, Glycine max
  Clone ID: 701101903H1
cttgatttggaaaaaatagccaaggatactcatggttatgttggtgctgatctagctgctttgtgtactgaagctgcacttc

SEQ ID NO: 8966 - DNA, 83 bp, Glycine max
  Clone ID: 701101904H1
acgtgggtgctctggatcacatctctgagctctttgactgctcccataccagctccaagctcaagaagaagcgcaaacaattc

SEQ ID NO: 8967 - DNA, 77 bp, Glycine max
  Clone ID: 701101905H1
ggtacaacaactttagtggaccgctacctacagatcttgggagtaatattccgctggcaatcctcttgctggacaac

SEQ ID NO: 8968 - DNA, 82 bp, Glycine max
  Clone ID: 701101906H1
aagcgtcgctccgcaccagtttcaccgcacgaatatattgttgtttggagcgatccgagaaaaactctgtaaacatgttggt

SEQ ID NO: 8969 - DNA, 270 bp, Glycine max
  Clone ID: 701101907H1
aagtgaatgctaagggtaaacccgaatatgttctaaagcgagctgaagatctcgcagctgccggccaaaaggcagaagcagtcgatttcctctatgaacaggttacgtcaaagagaaatcgtacttggagcaagatgagcgagaagattatggtcaagttcatcgagctttgcgttgctctccaacgcggcaagcaagccaaggacggcttgcaccaatacagaatcatcacacaacagattccctcgtcgttggaagttgtgttgaaga

SEQ ID NO: 8970 - DNA, 81 bp, Glycine max
  Clone ID: 701101908H1
caaaggttcgccagaaaatgcttctatcctcctcctgctccgccgccggctccgccgtctccggcgagatcatgctgttcg

SEQ ID NO: 8971 - DNA, 267 bp, Glycine max
  Clone ID: 701101909H1
cgagccgtgccatttggcacaatgtttgctctgatctttttatggactgggatctcggttccacttgtttttgtgggtagctatgttggattcaagaagcctgcaattgagaatcctgtgaaaacgaacaagatcccaagacagatcccggagcaggcatggtacatgaacccagtgttctcagttctgattggtggaatactcccatttggagctgttttcattgagcttttcttcatcctcaccccaatctggttgaatcagttt

SEQ ID NO: 8972 - DNA, 79 bp, Glycine max
  Clone ID: 701101912H1
tcggcattgagagctggaacagtgtgggtgaactgctttgatacatttgatgcagcaattccccttggagggtacaaaa

SEQ ID NO: 8973 - DNA, 143 bp, Glycine max
  Clone ID: 701101913H1
ggttctagcaatcctcgtgcatagttatctatcagttatatatgggtaagaactttcattattcttaaacaacgccaccgaacttacaatcataaacgttagtttaattaggcgtgcatgatcacatttgtgtattttaaata

SEQ ID NO: 8974 - DNA, 144 bp, Glycine max
  Clone ID: 701101914H1
aatattttggtgctctgtgtctctacgatctggatccaacggtccaaaatgttcggggcttgtgctgcttgttttcccaggttttagagctccaaaccttcagatccacaacattcgtctccagatcttccttccttgataacg

SEQ ID NO: 8975 - DNA, 268 bp, Glycine max
  Clone ID: 701101915H1
actgagcgctggaactttgcctgccctgatgcccccggtggaatcgataacccctaggtcaacccctgtgttcctggggcaccctctttggccactcttgcctgctctaagttgctcgttactatcactggcaaagacgagttcagagacagagatattctctaccaccacaccgttgagcaaagtggctggcaaggtgaacttcaactctttgatgctggcgatgaggagcatgctttccagctcttcaagcctgagactcatcttg

SEQ ID NO: 8976 - DNA, 142 bp, Glycine max
  Clone ID: 701101916H1
gctgagcgtgcacattcttcttcttcttcttgttctctttctctctctgaagcaaatgcagagcaattaataactcaagttttgggtcactgtgaccgtgatgatcgtaaagttattgtcttttgagtgatgggtttgtgct

SEQ ID NO: 8977 - DNA, 270 bp, Glycine max
  Clone ID: 701101917H1
cacatcttttctcctggatgttttaaagccgaatctaccagaacatgggttccttcagacaaaggtgttggagataaatctggtgactttccccaatgttgctgatgcaatattggctaatggcatgttcagccattatgaccgtcctcgtattgcccaactttgtgaaaaagctggcctttatgtgcgagctttgcaacattacacagaattaccagacatcaaacgcgtgattgttaatacacatgcaactgaactcagtcactcgta

SEQ ID NO: 8978 - DNA, 274 bp, Glycine max
  unsure at all n locations
  Clone ID: 701101918H1
cgaaagccatagtttgttacttctcttcgccttttgctttgcaattgtcaccaaacaattcttgcttagctctcacaagcaagcattatcaacaatgaagaaaattgtgttaaaggtggacttacatgatgacaggatcaagcgaaaagctatgaagacagcatctggcctttcgggggttcaatcagttactgttgacattaatgacaagaaaatgaccttattgggggatgttgatccagtgagtgcagtgtcanagctacgacagtggtgt

SEQ ID NO: 8979 - DNA, 267 bp, Glycine max
  Clone ID: 701101920H1
ggacatgcatctatggtggggttcctaagggactcaggtgcgtgatctccagaaaggtgtcgaaattgtaattgccactccaggaaggttaattgatatgcttgagtcaaatcataccaacttgcagagggtcacataccttgtattggatgaagctgataggatgttggatatggggtttgatcctcagctacggaagattgtctctcagattcgtccagatcgtcaaactttgtattggagtgctacctggccaaaggaggttga

SEQ ID NO: 8980 - DNA, 268 bp, Glycine max
  Clone ID: 701101921H1
cgaggattgtgcaagacaaggtgcagtgcccattcaaggccaaatgtgtgcaacagggcttgtggcacatgttgtgtgaggtgcaagtgtgttccacctggaacttccggcaacagggagctttgtgggacctgctatactgatatgaccacccatggtaacaagaccaagtgcccgtaaagcccatagaaggtgagccctatccaattgggcccttcacacaccaagcaaagctagcatagtttagtacataataaatgtgttatct

SEQ ID NO: 8981 - DNA, 269 bp, Glycine max
  Clone ID: 701101922H1
cggaattggaagttgacgagaacgacttgaaagccgccggcgctgaactcttcgccgaaggtggccggcgaggcattcgtatcaatggctggttgatcgagactcggaggcactccatactgaactcttccacattccaagagtgggaacagaaaatcgatacgtctcatttaccagaaatggtttttggggaaaacactttgattctaaaacacttgagccgtggaaccaacattcattttaatgcatttgatgctctacgtggctgg

SEQ ID NO: 8982 - DNA, 77 bp, Glycine max
  Clone ID: 701101923H1
cttttagcaagttaacaacacttttgtcttcgttccattatgtggttctcaattctcttcaccctttgcctctgaaa

SEQ ID NO: 8983 - DNA, 266 bp, Glycine max
  Clone ID: 701101924H1
tgctgtttcaataggggaatacatgctggcttcctggttaggaatgatgccaataacactggcacttgtatatgttggaacaactcttaaagatctttctgatgttacacatggttggggcgagttatgaaagactcgttgggcgtttatcattcttggtcttgtgatatcggttgttctgatgatatgtgttactagagttgccaaggctgctttagataaagccttggccgaaaatgaagatattgatgggattacttcctcgc

SEQ ID NO: 8984 - DNA, 268 bp, Glycine max
  Clone ID: 701101925H1
ctgaagatgatgtccggaaaatatacgtcgattgacgcgcagcagcttcagggatctgttcctgccgttccagattcacgacccgccaccgtcaatttcgcagattcaaatcttcagacatttcctccatctggtcctctgggcaagattactgctgcttccgggcctcctcgtgacgctgatgattcattttcaaaacctgtatctggttctgatgaaccccagcagggtggttggtttcagacttttacaattgctgcttacaaac

SEQ ID NO: 8985 - DNA, 76 bp, Glycine max
  Clone ID: 701101926H1
ctcaagcagaagcagatggatgccactagaattttggcacaaggagtatttgtgttccttgtcattacgtgtgtgg

SEQ ID NO: 8986 - DNA, 141 bp, Glycine max
  Clone ID: 701101928H1
cacaccccacttctgaatcacatcatgtcttcaatgttcaagtatgggactctcccaagtctgaggactctcaagagagcaattgcagaagctccaccattaaggaaccaagagggtgctacaagagaagaagaactgaac

SEQ ID NO: 8987 - DNA, 140 bp, Glycine max
  Clone ID: 701101930H1
ggttcatcgccctcaatccactttcaattacctatgcaggttaaagcctccatctgaatcccttggtgctgcttctttagccctgcactatgcaaatgttatcatcatgatcgagaagttagcagcatctccatacttga

SEQ ID NO: 8988 - DNA, 77 bp, Glycine max
  Clone ID: 701101931H1
gttggccatatctgtgttgagctctctccttctgacaacctcggcacagacagcatgcaagggccaggccttcaccg

SEQ ID NO: 8989 - DNA, 76 bp, Glycine max
  Clone ID: 701101932H1
ccttggctggttactctaaaattgactcagagcacatcatggttttcgttgggtaggggagtgggcaagcactggt

SEQ ID NO: 8990 - DNA, 273 bp, Glycine max
  unsure at all n locations
  Clone ID: 701101933H1
cactagttctagatcgcgagcgatctagaactagtttctgcttgatcngtttccttttcaagagcttgtctggtttcatagtcttcttctacgctgggtgaactactgatttttgtcactcaggctcctgtaaattatgtttctctccgttgtgtaaaacctagtttgaggccactgtctatggctatatctactgtttcaatccatgtctttggtgatgtgccttcctcaccacttgttggggtcctgcaggatcatatcaacgactggagg

SEQ ID NO: 8991 - DNA, 273 bp, Glycine max
  Clone ID: 701101934H1
acagcacggtggtgacgaccatggttagagacgatctatgcatcaccgttcccagcttcttccgctgccctatctccctcgacgtcatgaaatcccctgtcagcctctgcaccggcgttacctacgaccgttccagcatccaacgctggctcgacaacggcaacaacacctgtcccgccaccatgcaggttctccaaaccactgatttcgttcccaaccgaaccttacagaggctcatccagatctggtctgactcggtcactcaccgagtcg

SEQ ID NO: 8992 - DNA, 271 bp, Glycine max
  Clone ID: 701101935H1
ctattctctcgcattccgtggagatctagtgctcctgctgcaagacctcgctgaaaattagggtttcgattcggaggtagacgaagatgttcggaagggctccgaagaaaagcgacagaccaggtactacgaaatcctcggcgtttccaagaacgcttcgccggatgacttaaagaaggcttacaagaaagccgccattaagaaccatcctgacaaaggcggggatcccgagaagtttaaagagcttgctcaagcctatgaggttctgagt

SEQ ID NO: 8993 - DNA, 267 bp, Glycine max
  Clone ID: 701101936H1
gttttgagcaacattatggaacccgcactgctatctcaagctggctctgatttggataagtccgtttctcaagagacatttttggaggaatttaagatagtggcaatgagtgtggctaatcgtcttaaggagcaacctgtcatagttgctcacagtgagaacacctttgatggaagtggtgttaagagactattatccaacaagtttgaattggacaagattttgaactcagccatggagactatgccaaaagatcgaaatggaaag

SEQ ID NO: 8994 - DNA, 270 bp, Glycine max
  Clone ID: 701101937H1
tgtgagccatcaagtcatccatataacaaccttggtccaagagatgtgtgcacccaaagtcaccaagagcttgcccttgaagccgcaagacaagggattgtgcttcttaaaaacaaaggtccttctttgcctctctccactaggcgtggccgcactgtagctgttattgggcccaattctaatgtcactttcacaatgattggcaactatgctggtattgcttgtggatacactagtcccttacaaggaatagggacatacaccaagaca

SEQ ID NO: 8995 - DNA, 266 bp, Glycine max
  Clone ID: 701101938H1
tggaaatgcaatcggcagctgaaaaccctaattacccggcgctggactacaagcgaccttccatcttgtcatttcctcggaggcccgccctcagagttacatccgagttcgatagtgaaagcgcagtcttcttccataagatttcctgcaagttgttggacagccttgccaagttcaagttttcgttcaaccacagcggtaaggccggcgacatctccgaacctcaattcagctttgtctccaagcaccttagcctccactacgac

SEQ ID NO: 8996 - DNA, 264 bp, Glycine max
  Clone ID: 701101939H1
ctcgagccgctcgagccgctcgagccgattcggctgagtgacttggctgattctgtacgcttcccactgacggaagcggaccgaacgagaggttagacagatagtgcaacaggtttcacaagtctgtgatgctttgaaaggtggactagaccctttggagcgccaagtgagggatgtcttccatagaattgtgcgcaccgaacagaagggcttgactcacttggcaggccaagcaatgctgagtaacttgttgcccccatcatt

SEQ ID NO: 8997 - DNA, 268 bp, Glycine max
  Clone ID: 701101940H1
caattccttaacagtttctcacccttctcttctcttctcttcatctactcttttcaaaaagaatagatgcatgaagtctggtgacctctgatctgattccctcttgatgtcaaacaacagaagagaacgaaactatcaattatttatttcattaagtaaaaagccttagtggaaaatgggaggttgctgttgttctgccagaaaacctcatctgcaaggggcaccagtatattactattgcccaccaacttttgaagagcgtgagtct

SEQ ID NO: 8998 - DNA, 74 bp, Glycine max
  Clone ID: 701101941H1
cggaatcaatgcaaggaacagtgatccaagtctgagaaaccggagtgggccagttcaggtgccatacactttgc

SEQ ID NO: 8999 - DNA, 265 bp, Glycine max
  Clone ID: 701101942H1
gccgtgtggtgttgtgtttttcttttgtttcatctccatctttttcttcaaatttcccagaagagaaactcacaaagatgaggttatcattgaggcatgctttggtgtttgcgttaattggggcgttgtggaacttgcagagggcagagggtatccgatttgtgatagacagagacgagtgtttctcccatgacgtaaagtacgagggtgacactgttcatgtctctttcgttgttattaaggctgatcctccctggcattacgg

SEQ ID NO: 9000 - DNA, 263 bp, Glycine max
  Clone ID: 701101945H1
ctcgagccgatcgcatttcaaagctacaacttgtcattttatgccaaatgatacaaatgcgataggctacagtatagggtgtggaatgtccttttagatagaaaggaaggtaggttgtattgtacttcggtaattcttgctgctctcatttttgttcacaacctacaagttggtataacgttaggtaaggccaatggactagcttctgttcatgagggagatagagttagttagtgatggttatttaggattctaacagattg

SEQ ID NO: 9001 - DNA, 262 bp, Glycine max
  Clone ID: 701101955H1
atttccatggcggcggcgacgaacttgttagcaacactgggggatctggagacggactccatcgtggctcttctttcgaagctgatcgctgaatcgaagtacgtccagaacaacccgccggagctcattccccaagaggacagagtggtgaagcacgtcttggacgttctgttaccgttcagcaccaccaccggcggtggacccttgctcgtaaaccacgtcacctaccacgccggcagagggaacctcatcgtggagtacc

SEQ ID NO: 9002 - DNA, 259 bp, Glycine max
  Clone ID: 701101956H1
acaataacccaatcatagtctcactcgggattggttattcttattctaagagataatccaaatccaaacccaaaagaacaacacaatgaaaggagaatacgtagagcaatagcaacaccatcctaagagtgaaacaccacctagtatgttctcaaagcttcagcctcagcaccatcctttcccgcaccaccctttccaactctccgccgaggatgccaccaccatcaccccgagcaccgctcagaaggccaactcctcc

SEQ ID NO: 9003 - DNA, 262 bp, Glycine max
  Clone ID: 701101957H1
ctccgtggcattttcgtctttctgtaatttgttcttccctctcacactgttattctttctttctcttactttcttatgaatcagtctcatctcatccccaacaaccacacatgcaacaccatcagatgatgttgagtgaatgctactaccctttaaggtttttgacttcatagctggcgaatttcttgcactttgcttggtttttgtctcttgactgcttgtgttcttcggttgggatgaaagatgatgaagacttcggttt

SEQ ID NO: 9004 - DNA, 63 bp, Glycine max
  Clone ID: 701101958H1
atccagacgcgttggcaaaggcattcgtggagcactactacagcatgttcgacaccaacagga

SEQ ID NO: 9005 - DNA, 260 bp, Glycine max
  Clone ID: 701101963H1
ctcgagcgtgcacattcttcttcttcttcttgttctctttctctctctgaagcaagtgcagagcaattaataactcaagttttgggtcactgtgaccgtgatgatcgtaaagttattgtcttttgagtgatgggtttgtgctcttcggtccccagaaacgctaacgaagacatgaagctcaaactctcgttcggttcaaaatctgagaagcttgtgattcctccaacatccatcaagggacaacaacaacaacaacccca

SEQ ID NO: 9006 - DNA, 73 bp, Glycine max
  Clone ID: 701101967H1
ggtcaaccacatgggtatccctcactttctcgttataccatatccagttctgggtcatgcgaatccccttatg

SEQ ID NO: 9007 - DNA, 265 bp, Glycine max
  Clone ID: 701101968H1
gttgttgaaaagaaaccctagcaagtggagcaatggcagacgttgaagtcgatgtggcggcagcagcagcagcagggctgccgaagaagagaacgttcaagaagttcagttttcgaggcgtggatctcgatgcacttctcgacatgtccaccgatgaactcgtcaagatgttcagtgcccgcgctcgtagcaggttccagagaggcctcaccagaaagcccatggccttgatcaagaagctccgtaaagcgaaaagggaagctcc

SEQ ID NO: 9008 - DNA, 254 bp, Glycine max
  Clone ID: 701101969H1
ttcaaagattgcagtatgttgcatttacttcattgttaggatttgcattgtgcatcacatggaatattgtagctggtcacttcagcttggattaagggagaaggagtgaaaatatggtttcttgctattatctacttcatagcaggaattcctggagcatatgtcttgtggtatcgcccattatatcgtgcttttaggactgacagtgctttgaattttggatggtttttcttgttttacctgcttcacctagg

SEQ ID NO: 9009 - DNA, 62 bp, Glycine max
  Clone ID: 701101970H1
gccagcaaacggaaaagtctttgtgatcttttttctacagattgtacaaaaacagtggctca

SEQ ID NO: 9010 - DNA, 71 bp, Glycine max
  Clone ID: 701101971H1
ctggcatgttgatcaatgataagcaggtctatgtaggccattttctgcgacagccagatagagagaatgct

SEQ ID NO: 9011 - DNA, 72 bp, Glycine max
  Clone ID: 701101975H1
acggctcgagtgaagcttccccgactacagaacattataatgcagcatgttgatcattcagctggagatctt

SEQ ID NO: 9012 - DNA, 258 bp, Glycine max
  Clone ID: 701101976H1
cgcttgctcccacaagagcttagagagcgtgtgagacgatatgatcaatacaagtggttggcaacacgtggtgtagatgaagaaagtttggttcagagtttcccaaagggtcttcgaagagacattaagcgtcacctttgtctggctctagtgagaagggttccactatttgagagtatggatgagagattgcttgatgccatatgtgagagactgaagccatggttatttacagagagtacttacattgttcgtgaa

SEQ ID NO: 9013 - DNA, 262 bp, Glycine max
  Clone ID: 701101978H1
ccccacggggcaaattgagttgggtgttggaaaggcagagcaagcctagtaacataatcaaacatggcggttaggcaaagagccgtgtctggacttccaactcttctacgcactctccgcaaagaacctttgaagcctcgcaaccacgcacacgtcaatgccttggcctctcttcgacgcgacttctctttgtacgatcagctcaacctcatcgatcaagtccccgcagaccagctccgatttcaagggttcctaccaaccc

SEQ ID NO: 9014 - DNA, 263 bp, Glycine max
  Clone ID: 701101982H1
cttgtttcttttaagatatttttggtcacatagtttatggtctgcctctgcgtagtgcttcaacagccccctgctcgctcgatcatcttgattattttttaagccttttaaatgcccaacatcttgttcttgatgtttgagattgatgtatccaattcttagtgaaatcttcttttccgggtgtatgatcaattctactgtgagacgacgcaggacccatttagttcaatccttctccgttgcttttctttactggctctact

SEQ ID NO: 9015 - DNA, 260 bp, Glycine max
  Clone ID: 701101984H1
tgacaatcttgagggctactacagccctatagatcaggtggaacagaaaccactggttaaccagtaagttaaccgtgccccgtttgctggaaatggagcttcaagtctcacctgttactccatctgctgatgttactgcttacttcagctctgagcattcgagcagctcgtttgattattcacgacctcggatggggtgaacaagtccccaagacacccgagatctcatccatgctttctgctgctcctttggacggtga

SEQ ID NO: 9016 - DNA, 73 bp, Glycine max
  Clone ID: 701101985H1
cgagaacagcctagtcttcggtgacaagccagtcactatttttggacacagacaccctgaagagatcccatgg

SEQ ID NO: 9017 - DNA, 259 bp, Glycine max
  Clone ID: 701101986H1
ttaaggatgctgctatggggaagaggagcaagattacgcgcgatagggatcgtgatatcagtgaaaaagttgctcttggtatggcttctaccaagccgggtactgaggttatgtatgatgagaggctgtttaaccaggataagggaattgcgtctgggtttgccactgatgatcagtacaatgtgtatgagcatgggttgtttactgcgcacccacaatttccacattgtataggccgaagaagaatattgatgatgag

SEQ ID NO: 9018 - DNA, 134 bp, Glycine max
  Clone ID: 701101987H1
gttttgatagagctcctcctgttccttttgaggaaattgaatctatattgcgcaaggaattaggaaagccattagaaagtgtctatgaatacattgacccaacacccattgcacctgcgtctatagcacaggtt

SEQ ID NO: 9019 - DNA, 133 bp, Glycine max
  Clone ID: 701101989H1
actcgagccgcggaacgttgccacaaacgttgttgttttcagatacccacgtgactatgtacctatcaatctccatctctgagttcaaccgaaccaaactcgcgaagctatggcagaggtccaaaccaaggtt

SEQ ID NO: 9020 - DNA, 257 bp, Glycine max
  Clone ID: 701101990H1
ctctttattattccttccttccttcttcgcatcaacaaaccctaacatagcatcctaagatacagagactatcaccatcgtcctgctcatttggcacatgcttctccccctgaatactttgtccgcctggagaacacaagttacaaagacgatctatatttaaggaagatgacaaggatgcgtcggtggcgttgttgtacttgtcacgtggaagagtcttacccatcagatgaacatgaacactgaaaagccaagga

SEQ ID NO: 9021 - DNA, 255 bp, Glycine max
  unsure at all n locations
  Clone ID: 701101991H1
actcgnaccgattcggctcgagacataatactactacaagagatgactttctgcaggttttctacttcttcaatcagtgtctactacctgcgggttcttcttcttctccttcacccttctcttctgcttcttctccttcctcgtcttcatctccaggatgaagccctggtgtaactgcgatctttgcaagagctacttgacggtgagttggctgaaaaagttccccaatctctgcgactggtagactcatctctt

SEQ ID NO: 9022 - DNA, 245 bp, Glycine max
  Clone ID: 701101992H1
ctcgttttgttcgcttcagtctgcaacgtcgctatgtcggactccaccgccacacccctcgaccagcacgccaccacgggctctgaccctagtgcgccacggttcacatcgtgtacaccgagagaccacagaacgaggagcctgaggcctaccacatcagaaccctcacttcagtccttggcagtgaggaggctgcaaaggaagctttgttgtatagttacaagtctgcagccagtgggttctca

SEQ ID NO: 9023 - DNA, 58 bp, Glycine max
  Clone ID: 701101993H1
caatgacatgtctcacactttccaaagccttgtcaaaatcgtcgccgtgcccggaggc

SEQ ID NO: 9024 - DNA, 75 bp, Glycine max
  Clone ID: 701101994H1
ccgcgtttccgagaccgagcgcgtatccatgctcgccatggaggatttgaaagtcaactctgagtgcatgattac

SEQ ID NO: 9025 - DNA, 260 bp, Glycine max
  Clone ID: 701101995H1
cctttctacaacactggtgctttgtgctgggttaagtccaacgccaatctgaagcagcaagtgggtttggcaccaagacccatttgttcatttgaggggaataatcagaggaagtttgtggcaatggcttctaccgttcctgtggagcaagtcaacaatggccccctgcaggtgacaggtgactccttcatcagacagcatctgaggaagttggctccttatcagcccattttgccctttgaggttttatcagctcgcct

SEQ ID NO: 9026 - DNA, 255 bp, Glycine max
  Clone ID: 701101996H1
atccttcggttgtggatgcttctgattgtctctttggtaagcaaggaactttctatagggatcttgactttgcccttgtgttgaattgtgagagaaggccaaccataattgatctccctcccaccaagttcaatgattccgaccttgggaagattccttttgttgccggaatggtactattttgcctccgtccatggatcctagcatgtctgcttcgagattccaaatgcaggtcttcaagatgccgccggcgct

SEQ ID NO: 9027 - DNA, 255 bp, Glycine max
  Clone ID: 701102001H1
ggttgccgtgccaccatcttctccaaagttatcatattcgaagagaaaaaaggagtgactgtccaggttgggcaattagggacggaaaaggagaaacacgaaaatgtttttccacatagtactggagcgaaatatgcagcttcatccacgctactttggtcgtaaccttcgcgataatctcgtttccaagcttatgaaagacgtggaaggcacttgcagtggccgacatggatttgtggtggcagttacagggat

SEQ ID NO: 9028 - DNA, 250 bp, Glycine max
  Clone ID: 701102002H1
tctacatcctcttccatttctctgcaactgcattctctttccctttccgccgcagcgattttcagagatttaaccttctttgttcgtagatatgcgcggttactgattagtcgatgatagctgtcgacaaatttcacatggaaagagaacgaacacggaaacgccctcgtcttgcatgggacgttgcccctccctcagtgtccgaggcgcaacgggctctgccagtgcccggtgacgaagacttcgaaag

SEQ ID NO: 9029 - DNA, 240 bp, Glycine max
  Clone ID: 701102003H1
ggggacacataaacccggcggtgacatttgggctgtttttggcgaggaagttgtcgttgcccagggcgattttctacatcgtgatgcaatgcttgggtgctatttgtggcgctggcgtggtgaagggtttcgaggggaaaacaaaatacggtgcgttgaatggcggtgccaactttgttgcccctggttacaccaagggtgatggtcttggtgctgagattcttggcactttcatccttg

SEQ ID NO: 9030 - DNA, 244 bp, Glycine max
  Clone ID: 701102004H1
cgcttgttgccgagcacttcaagaggggctttgatcaacaatggctatcattaacattctcaaaggctatatttcttggaaatggtcttgttgctattttgtctgggctgtttggaaatgtacttgttgatacattggctcttggacctgtggccccctttgatgctgcttcatgttttcttgctattggtatggccatcatactatcttcatggtcagagaatttcggggatccttcagagaa

SEQ ID NO: 9031 - DNA, 245 bp, Glycine max
  Clone ID: 701102005H1
ctcgagccgcttcatctcccaagggattcaatacaataccaggctagaagaaactccactcatcaccatctcaagcaactaattaacaagctagtactctttgagtgtttggcaattggcttagatttcttgtacttggaacaagatggaaagcactgtcacatttgagactgatctcaacctcaaggcaaccgagcttagattggggcttccaggaacagaagaaattgttgaaaaaccacttc

SEQ ID NO: 9032 - DNA, 247 bp, Glycine max
  Clone ID: 701102006H1
cgcggagttcagcggcaccaccaccaacgccagcgcaatcgcgcgtcagatccttgaaaaaatccccggcaacaacgacacgcacgtttcttactctcaggatcgctacatcttccatgttaaacgcaccgatggactcaccgttctctgcatggccgacgacaccgccggaaggcgaattccttttgcgtttcttgaggatattcatcagaagttcgtgcggacttacggacgcgccgttcactcc

SEQ ID NO: 9033 - DNA, 246 bp, Glycine max
  Clone ID: 701102007H1
ggatttcaatcgttgttctctccgaaaacttcgcttcttcctcgtggtgccttgaagaacttgtgaagatccttgagtgcagggaaacaaagaagcaactcgttattccaatcttttaccgcatggatccctccgacgtaaggagacagactggttgttatggggagagcctggctcaacatcaatatgagttcagaagcgactccgagaaagtacgcaattggcaggaagctttgactcatgtcg

SEQ ID NO: 9034 - DNA, 246 bp, Glycine max
  Clone ID: 701102008H1
gtacgcggtgatatttgcggaaatgttcgtgatcgtcagcctcctcttcaaaactccggcgaggaagctggtgatcgtcacattggatcggctcaagcgcggtcgcggccccgttgtcgtcaagaccgtcgccgccacgctgctggtggtgctcgcttcctacctctacagcatcgcaaaaatccggcatcggaacctcgatgctcccgtcgctaaccccaccgaccaagtcctcgtgtacaagca

SEQ ID NO: 9035 - DNA, 249 bp, Glycine max
  Clone ID: 701102009H1
cataaatggctactgaacatgaagacgatttcaaggatgagaagaatccccgccccctcgacgaggatgacatcgcccttctcaaaacctatggtttggggccttattccacaagcataaaaaaagtcgagaaggaaatcaaagacatggcaaaaaaggtcaatgatttatgtggtatcaaggagtctgatactggtttagctgcaccaagccagtgggatcttgtttctgataaacaaatgatgcagg

SEQ ID NO: 9036 - DNA, 247 bp, Glycine max
  Clone ID: 701102010H1
cgcaaggcgtgcaccaacggcgagtgtggtgacgggacttccatggccaatcacttcgagcgacactattgcggcaagtgtggcgtgacctatgtctagcagaaggccgatgcttaaattcgttggaagtgaatccactgtggtgctaaatacattgtagttattcaaaagttctggttaatgtaattgtgcaattagcgttatgagtgtctgggcgtagactagacctttatgaatactgtttcgc

SEQ ID NO: 9037 - DNA, 248 bp, Glycine max
  Clone ID: 701102011H1
cggctcgagataagctacgacgttccatcgggacgaagagatgggcgtgtctcgatcggcgatgaagtgctagacaatcttcctagaccatccttgagcgctgatgatcttattagtaactttgagcgaaagggtttgtcagcagatgaaatggtgacactctcaggagcgcattcaatcggtgtgtcccattgtggtgccttctcgaatcgcttatactctttcagtgacacagtcacacaagatcc

SEQ ID NO: 9038 - DNA, 252 bp, Glycine max
  Clone ID: 701102012H1
ctgcttcttctgcctctgcatcttcccgcaaactagtgctgaggattaaatcaaacgagggaatcaagagatccgtgcggcagactaattcaagaaagaaacccaaagcaaagcaaaagaagaacaaacaaatgtttgatgctatgaaacccaagaaacctccgacagctttcttctacttcttggaggattttcgtaaagaatttcaagagcagaatccagatgtaaagtcaatgcgtgatattggcaagg

SEQ ID NO: 9039 - DNA, 251 bp, Glycine max
  Clone ID: 701102013H1
ctcgagccgatctcacatttcattacttctagccagctattacttcttttccttcctctgtctacatttcatttcattcaccacaatcatggcatctctacattccacatgttcaacaaaaaccgtcctttatgcattggtactgttggcctcttccatggcaacttctaccaggattttgacataacatggggagatggtcgtgccaagatactcaacaacggcgatcttcttactctttcccttgacaa

SEQ ID NO: 9040 - DNA, 252 bp, Glycine max
  Clone ID: 701102014H1
ctctcccactcgccagtgttgcggaattttttagaagtgtgaatgttcgttcatgcatgagcggctcttaaagttgccttgcggattcgattgcgatatattgagactgcgatggcctcagccgtcgtgaatttcttgaacgcgacgttggattgggtgacgtttgcgtcggatggtccttctgcgcgagctgtagttttcggagtccatatcggtggacatttgtttatcgaagtgtttttgctagttgtc

SEQ ID NO: 9041 - DNA, 255 bp, Glycine max
  Clone ID: 701102015H1
agattattaatttgctttataagaatgggtactatgttaaaatagaagaagtggctcaatttctccttaaaagaggaaagctgtcagaagcatgcaaattgttgctttttagtttggaaaatcaccagaatgttgatattgatttgtgtaatgcaactattttgaatctttgtaaaattaacaaggtttcagaagcatttagtttatgctatgaattagtggagaacggtttacatcagaaattgacatgtctag

SEQ ID NO: 9042 - DNA, 256 bp, Glycine max
  Clone ID: 701102016H1
ggtagaaagcgagcttttctctttgggaatgaccaagtttaacgtggaagaagagtctactagtgacttggaggaggaactgaagcgggtgactgcagaaaacaagaagttggccgaaatgctctcagtggtgtgtgagaactacaacactttgagaaaccatttgatggaatgcatgaggaaaaatggtgaaaaggaggtcagcccaacatcaaagaaaagaaagtctgaaagcagcaacaacaatagtaatttg

SEQ ID NO: 9043 - DNA, 240 bp, Glycine max
  Clone ID: 701102017H1
cctgtaaagatctggcatctcgtggatatcctctaggcggttataatattatttagggttttcttttgggtaattagtaaaccgaaattgttttgtgagacctagaaaaagggtttcggttttcataaggattttataatgcatgcagttcttccaaatcactaacaattgtttttaataattggtgggtgtctttcacctatgttgcctaaaaaacctgaaatgtttttttttaaacca

SEQ ID NO: 9044 - DNA, 246 bp, Glycine max
  Clone ID: 701102019H1
aaggaggtcaagtcccagccacttgcagaaaagaaagcccctggtaaaaagccaactggtttgggtgctcccccatcaactgcagatgcatatgagaggatgctttcgaccatttcagagtgtgcaaactttgggaagcttttcaagtcctcagcacccgtggagctcactgaagctgagacagaatatgctgttaatgtcattaaacacatttttgataggcatgttgtgttccagtacaactgc

SEQ ID NO: 9045 - DNA, 246 bp, Glycine max
  Clone ID: 701102020H1
tcaagattcaggtactgcgtttcggaagcagacacagatggctcgtacgaagcaaaccgctcgtaagtccacaggaggaaaggctcctaggaagcagcttgcaaccaaggctgcacgtaagtctgcaccaactactggtggtgtgaagaagccccaccgttatcgtcctggtaccgttgctcttcgtgagattaggaaataccagaagagtaccgagcttttgatccggaagctccccttccagag

SEQ ID NO: 9046 - DNA, 231 bp, Glycine max
  Clone ID: 701102021H1
atgagctggaagcagtttccatttttacaataaataccatatgcttgtgcgtggtttcattgactggccattggaaatattaaacattgaaccattgcagaattctgtattttttttgaaacgatttatccagaatcattggttatgcaagtcgcagactttctagtttgcctatggatgtttaaacagggaaaatcagtaatgctcattaatttcatttagcattcaact

SEQ ID NO: 9047 - DNA, 243 bp, Glycine max
  Clone ID: 701102022H1
gagaatttgaaaaactcggtcaagaacactgtgagccaagtttccaaaaggattcttaccacaggtgtcaatggagaactccatccttcaagattttgtgaaaaggatctgctaaaagtggttgatagggagtacgtattttcctacattgatgacccctgcagtgctacatacccattgatgcaaaaacttaggcaagtgcttgtagatcatgccttggtaaatgcagagaatgagaaggat

SEQ ID NO: 9048 - DNA, 241 bp, Glycine max
  Clone ID: 701102023H1
attttcatggaactgatggatcgaaagcctttgtttcctggcagagatcacgtgcatcagttgcgtctacttatggagctgattggcaccccatcagaggctgatttggggtttctgaatgaaaatgctaagagatacattaggcaactgcccctttaccgccgtcaatctttccaggaaaagtttccacatgtccatcctgaagctatagatcttgtagacaaaatgttaacttttgatc

SEQ ID NO: 9049 - DNA, 244 bp, Glycine max
  Clone ID: 701102024H1
ggggagagagaaaaagagagacgtagacaaaaccgaagagtctctctcttcctatctctctctttcaatgtcagggcacaaatcttccacctcgacttcttcggcttcttcattctaacctatatcagaaggaaacgcggtaaaagaaaaaaaagaaactggcagacgatcttataagccgcaaaattttacaccatttaatttggctgagtcagatccgtccgggatggtatccatggattct

SEQ ID NO: 9050 - DNA, 244 bp, Glycine max
  Clone ID: 701102025H1
cgcgaaatcgcgaacagaacagcaacgttaacaatgggttctcgctacgaggtggaactgaagctctcatcggcacgcgctctcaagaacgtgaactggcgccatggcccgaaccgaccatacgtcgtcgtttgggtcgacccaagcaacaagctctcgacgcgcgtggacgaaagcggcgacactgacgcgaattgggaccaaacgctcacaattcagttgccaccaacagctctcgaggatc

SEQ ID NO: 9051 - DNA, 247 bp, Glycine max
  Clone ID: 701102026H1
cttcttacaagttacatccattgagaaacatgaaggtctcccccttagcattttcaatcctttttttgtccttcaccatagaactcttcattggcattgcttcagcagcacaagaaccagtgcttgacacctcaggccagacgctgagaacaggtgtcaagtactacattctaccagtcttcagaggcagaggtggaggcctaacagtttcaagcagtggcaacaacacatgccccctctttgtggt

SEQ ID NO: 9052 - DNA, 248 bp, Glycine max
  Clone ID: 701102027H1
aagatgaaatcctctcttatcttgttatttatgatctgtggtggagtgattgcaactcctccagaggatccaattccgtgttcttcaaagaacacagactgcaccatcacaaacacctatggcgtctttccggaccgaagcatttgccacgccggtgaggttatgtacccaaacacagaggaggagctcatatccgcggtggcctcagcttcgaagaacaaaagaaaagtgaaagccgccacgcgctt

SEQ ID NO: 9053 - DNA, 251 bp, Glycine max
  Clone ID: 701102028H1
cacacaattcctacacatttctactctttagtttctccaattttctttctcaattctcaacaatggccactacaacacaacttcacttaccccctggattcagattccatccaacagatgaagcactcgtcatccactacctttgtcgcaaatgcgcttcgcaacatatcgcggttcccataatcgccgaaattgatctgtacaagtacgacccttgggaccttccaggaatggccttgtacggagagaaa

SEQ ID NO: 9054 - DNA, 248 bp, Glycine max
  Clone ID: 701102030H1
ctttcatctttctccctaacggtatcgagggaaaaatatggcggacagaacacagatgccaggcaccgcgcttctgcgccaacaattgcggtttctttggcagccctgccacgcagaatatgtgctccaagtgctaccgcgatttccagctcaaggagcagcaatcttccaacgccaagatggttctcaatcagtcgctggttccttcaccgccaccggcggtgatttctcagccgtcgtcttcttct

SEQ ID NO: 9055 - DNA, 254 bp, Glycine max
  Clone ID: 701102031H1
ggagtcatctcactgctgagggcgatgtcgagttcaaggcagtcctgtttgtaccacctaaggcacctcaagatttatacgagagctattataacgcaaacaaatccaacctgaagttgtatgttagacgtgtgttcatttcagatgaatttaatgaactgttgcctaagtacctaaactttttgctgggtcttgttgattctgacacattgccacttaatgtatcgcgcgacatgcttcagcaacatagtagt

SEQ ID NO: 9056 - DNA, 240 bp, Glycine max
  Clone ID: 701102034H1
gcgatcacctttctgcttattcaaaagaaccccttagtttttctctgaggttgaagattgctctaggatcagccaaaggtcttttatatctacacacagaagctaatcctccaatattccaccgagatgtgaaggccagcaatatattattggactctaggtacacagcaaaagttgctgattttggactttcacgacttgccccagttccagatactgaaggaaatgtacctggtcatg

SEQ ID NO: 9057 - DNA, 244 bp, Glycine max
  Clone ID: 701102035H1
gtgattttcacacggaaacaaagagggaacatgatctgctggatgtgggaggtcaggttaatgaagaggctgagggcattgagaatgctaaatggatttccatcaaagcagttctgcttctgctattgggtactattattgctgctgcgtttgctgatcctctggttgatgcagtggataacttttctgaggctacaagtattcctgctttcttcatttccttcatttttctgcccttagcaac

SEQ ID NO: 9058 - DNA, 240 bp, Glycine max
  Clone ID: 701102036H1
gaagcttcatcacctcactccaccaatccccacttcgccctctctctctcactctcaccatggagaacctctcatactttctcttccttctctttctcttcgcaacccacgcacgtcccgacctccccggtacgtgggagcttctcgtcccggacgccggcatcgcttccatgcacacggcggtgccacgcttcaacacggtggtcctcctcgaccgaaccaacataggcccatcccgaa

SEQ ID NO: 9059 - DNA, 103 bp, Glycine max
  Clone ID: 701102037H1
cagatttcatttttcttcttcttcttctctctctgctttgtgcttattgtattttatggacaaaggatggggactcacccttgatacctcttcctctcaatct

SEQ ID NO: 9060 - DNA, 237 bp, Glycine max
  Clone ID: 701102038H1
gagctctttagggtttatggagttactgggtgtgcaggactatagtcctctgcttgagttgcctcaactttcaactgtgtccgtgcaatctcatcatcactctacagttacggttccttctgataacgggaaagagtgttctgaggtgttgaaccaccagcctgccactccaaactcttcttccatttcatccgcgtccactgatgcagtcaatgatgaacagaagaagactcctag

SEQ ID NO: 9061 - DNA, 243 bp, Glycine max
  Clone ID: 701102039H1
gttccttttgaaggttagaagtgctacaatacaaacaatggcagctactcaggaagatgtgaagcttttgggtattgtgggaagcccatttgtgtgcagggtccagattgcccttaagttgaagggagttgaatacaaatttttggaagacaatttgggcaacaagagtgatttgcttctcaaatacaaccctgttcacaagaaggttccagtgtttgttcacaatgagaagcccatagcaga

SEQ ID NO: 9062 - DNA, 242 bp, Glycine max
  Clone ID: 701102040H1
cgtgttggctttgactcaaaagctgtgtgtggcatcagaaaatggcgcagtttatcaatggcacttctccacccaaatcttcttgccactttcaattccaacactcttacctttccttccatcaaactcaaaccctcactctcgcacgtgccttctccaacccccacacgcttcagtctctctgtttccgcggcgggaaccaccgcttttgccgcccctcccactccccaacctgagaagct

SEQ ID NO: 9063 - DNA, 246 bp, Glycine max
  Clone ID: 701102041H1
cgactatgttcacatgacatactggcctttaaaagagatcatgttgctaggtccgtgctggttcgaagccctttcatccttccggatggtagttcagaatcagctacaacgtcccttaaagggaacacagagggatacagatcatgcagtgaaccacttcaaagatcagatgatgttactgtggacagttcagtttctgctaagcgccgtgtcagaatcgccatatctatggacacagactcaaaa

SEQ ID NO: 9064 - DNA, 245 bp, Glycine max
  unsure at all n locations
  Clone ID: 701102042H1
gaaggactttaggttgggatttgggaattagggttattcgcgtggcgaagatgattgaggtggttttgaacgatcgattggggaagaaggtgcgcgtgaagtgcaacgncgatgataccatcggcgacctgaagaagcttgtcgcggctcagactggcacaagagccgacaagatccgcatccagaagtggtacaccatctacaaggatcacatcactctcaaggattacgagatccatgacggc

SEQ ID NO: 9065 - DNA, 245 bp, Glycine max
  Clone ID: 701102043H1
gtcttactgttagcaatgccttcctctttctccatccatttcttcctcctcctctcaatagcccttttctcagtttgttgcttagcagcatctcaagctcccaccaccaaatcacactcctatatccttcccattaagaaagaccccgcaacaaatttgcactacacttcagttggcattcgaactcctacgcacaactttgatttagtcattgatctttctggtgaaaacttatggtacgattg

SEQ ID NO: 9066 - DNA, 251 bp, Glycine max
  Clone ID: 701102046H1
gggaaaaaacatgttcttcttccaagtgtgaacaatattataagcgatgtggaagggatagagattagtataggtgatggtgtacttgagagctcacaacaaaatatgtttcaagggattctgtccccgggtccagcttcgctatctcccattccttcgaattttttctctccaccgtcttcttcggatccaagcatgattagcttccttcgtgatttgagtcctatgtttcaaagcggaagaaattttac

SEQ ID NO: 9067 - DNA, 253 bp, Glycine max
  Clone ID: 701102047H1
attctttcagcctcccttcaacacccttttggcccttcattcttccaagtctcaaatcgaagctcgaagacctgcgaagaacaaagggttgtttaaattctgtgtggttgttgttggaggttgaaatacaagttgccgcctcaagtgtgtgttaatcttaaatttcacaagcaagttgtatttttggagtattgtattatatgaccaaatattttagtgttttaggactagatattttgcttctggtggcaat

SEQ ID NO: 9068 - DNA, 249 bp, Glycine max
  Clone ID: 701102048H1
cctcacgagtgcttgggattgactttcttcttttcatagcattacataccatcttaggtataggtgtggatgcgcctacaggatgatttttctccccccagtgtttttatgatcttcaatttacttgtgtttcaagccatcatcattttgtactattttacagtgctaatcattgtggggaatgggttgtgtatgtggtctagtatccacatcaataaaggttgtgtaatgatggtaggtattggtgat

SEQ ID NO: 9069 - DNA, 223 bp, Glycine max
  Clone ID: 701102049H1
gttgaagaagaaattggagaagatggaagcgcagaacagcctcgttgatccgatcaaagccaccccagggaaattgaagaggaattcatccatgaattccaaagagtcctccaaaaatggaaaccctgagcacattgctgtacagacattctcattccgtgaattggcaactgctagtagaggcttcacagccgaatgtcttttgggtgagggatgctttggc

SEQ ID NO: 9070 - DNA, 64 bp, Glycine max
  Clone ID: 701102050H1
ggtccgggagtcgcagctgtgtcaagccgcgtggaaaacgtcttgaaggccgccgatagcgtca

SEQ ID NO: 9071 - DNA, 243 bp, Glycine max
  Clone ID: 701102051H1
cgacaactctatctttctttctcattcggccaaaatggccaagaaggtttaccctcaggatcccacttcctctccctgcatgtcccatggaccagaaacatataccctttggatgaaatcacttattctccactctaacggttgcaccgtctatgattcaaatggtgtcatcgtttatcgcgttgataactatgacacaaagggtagaagacacgttaaccttttggatctgcgaggcagagt

SEQ ID NO: 9072 - DNA, 240 bp, Glycine max
  Clone ID: 701102052H1
ccgcccccaacggcgacatcgccgccttaaccaaaatcgactcggcgaggcagtgggtggcgacgcacatcaaaccctttcaccctcagaccaaaattaattacatcctcgtcggcagcgaggttctccactggggcgacaccaacatgatccgccgcctcgtccctgccatgagaacccttcactcagccctcctagccgagggcataaccgacattaaggtaaccactgctcactctc

SEQ ID NO: 9073 - DNA, 240 bp, Glycine max
  Clone ID: 701102054H1
gcttcttccatcctcagagcttgccgtcaacaacgattcctttcggttttctgtttctctggattcattttcatttttacggctaccagaatgtccagctcatcggaatattcggcattttccggcccccgcccggccaagtcgccggccgagaagtccactttctctcagacttgtagtctattgagccaatacatcaaggaaaaaggtgccttcggagaccttaccctcgggatgact

SEQ ID NO: 9074 - DNA, 239 bp, Glycine max
  Clone ID: 701102056H1
ctgagaaacatttcactaatagagagacataagcataatattgagaaataatggagggttgtacttattgtgtgaagttgctatgccttgttgggtttgtggtgcttgtgagtactattgcaggggtggagagtgctggtgaatgtgggaaatctaccaccccagataatgaggcttataagcttgcaccatgtgcctcagcagcacaagatgagaatgctagtgtttctcagagttgc

SEQ ID NO: 9075 - DNA, 85 bp, Glycine max
  Clone ID: 701102057H1
ccgaatgggagcatcatcatcacattgaaaagacaaggcaagacaatcaatggcgacgaccgcttcaccatcttccaaaccctca

SEQ ID NO: 9076 - DNA, 116 bp, Glycine max
  Clone ID: 701102058H1
tccaattcttcgcttcccaacctgggttttctccataacccttcaagtttaactctttttccatttgggtctctctctcctccttcggatctgcttctgattccactttaaaccgc

SEQ ID NO: 9077 - DNA, 241 bp, Glycine max
  Clone ID: 701102059H1
ctaagaagagctataatgcgacttttggaggacagcatggctgagaagatgcttgctagagagattaaagagggtgactcagttatagttgatgctgactccgatggtaatgtgattgtgctcaacggtagtagtggtgccccagattcattagaagaagctcttcctgtgtaacgtggttgtcttagttagttgagttgtatttttttctctcttttatttgttaaaagaaacatagcaa

SEQ ID NO: 9078 - DNA, 242 bp, Glycine max
  Clone ID: 701102060H1
cgattgttcttaatttcttaatcctccgtcgtgggtggcgatcttgttcttctccggagcggattctcagatccatggaccaggctcatattattaagccaaagcctctcagatccgcggtggcggcgtgacggaaatgaagtcctcaagccgtctcttcacgatcggactggtgtcggcgtggtactcctccaacattggggtactgctcctcaacaagtaccttctcagcaactatggct

SEQ ID NO: 9079 - DNA, 247 bp, Glycine max
  Clone ID: 701102061H1
gcagacttctcccgggaaaaaaagtaggtaaaaaaatatgctaagtataaattgtctactgatgaaatacgaaagctgatgatattgaaaaaaaaagaattgtaaataaggttcaggttcgacttccatagagaatatagatgatattgtctataatgatagacaaaaaataaaaaactttcgaaagattttatccaattgaaattttaaaaatgactgggataaacttaagacttcaattattgaa

SEQ ID NO: 9080 - DNA, 243 bp, Glycine max
  Clone ID: 701102062H1
accaacctcagttgtgcctcgagcccaccagaaacataacaaagaagcactacagaggagttcggcgccgcccctggggaccatacgccgctgagattcgcgactctgcccgccacggcgccagaatatggctcggcaccttccaaaccgctgaagaggctgccatggcttatgaccgagccgcgttcaagatgaggggctccaaggctttgctcaatttcccagctgaaattgttgctgcaa

SEQ ID NO: 9081 - DNA, 250 bp, Glycine max
  Clone ID: 701102063H1
cgccacttctgaatctattgaatcaacaatcatgtcggacgaagagcaccatttcgagtccaaggccgacgccggagcctccaaaacctaccctcagcaagccggtaccatccgcaagaacggctacatcgtcatcaaaggccgcccctgcaaggttgtggaagtttcgacttccaaaactggaaagcacggtcacgctaagtgtcactttgttggaattgatattttcactgccaagaaacttgaggat

SEQ ID NO: 9082 - DNA, 233 bp, Glycine max
  Clone ID: 701102064H1
cggatcgaggcaggagcgttctggatttgaagggacctggacctgtaatcctcttattttcgacgactcatacttcacggagttgttgagtggtgagaacggaggtctccttcagctaccttctgacaaggctctctttgtctgaccctgtattccgccctctcgttgataaatatgcagcggacgaagatgccttctttgctgaatgcgctgagggctcacaaaagctttcc

SEQ ID NO: 9083 - DNA, 243 bp, Glycine max
  Clone ID: 701102065H1
ctgttatgtttggcatgtgctcaattttccttttggtggcttgtatcttgcaaaggcgactgatggtgatttccgataagccaaaaacagaagattggcaattgaaggatagggacgcagagtcagaaccattgaacctttaactggcttttgcctgagttttgaggaggcaccgaacttagctacttaagtcttactaatgcagtttccgtctacatatgtgcacgatgcgatttgagtgaa

SEQ ID NO: 9084 - DNA, 213 bp, Glycine max
  Clone ID: 701102066H1
ggcatctacaaatatgttaacgatgttgtggaagggctacttgcaccagaccacaaaatcgggagatttatatcagatgctgtaggttcccttcccaaattgtccccatcagtttttgataagcttgtgaatgacagtttgcaggatcacttgcttttgctgtatttatctagtattacaagaacgcagcttagcttggctgaaaaattgaac

SEQ ID NO: 9085 - DNA, 224 bp, Glycine max
  Clone ID: 701102067H1
tgacaatgcaggcaacagaccttattctgctgggcctgggattgatcatcgtcgcgtgggggtggccgagcaagtgcagaaccatatgaggggatgcgttcgaccatttcagagtgtgcaaacggtgggtagcttttcaagtcctcagcatgcgtctagcgcactgaagctgagacagcatattccgcgaatgacgtccaacacattgctcaataggcctgcag

SEQ ID NO: 9086 - DNA, 238 bp, Glycine max
  Clone ID: 701102068H1
ctaatttctcgaaaggtagggttttgcagagcctcgtcctcctctcacggtttcttctttttatcttctcacctttcttcttccactgctctaatctaagatgggcaagtcaagcaagaaatcagctctcaaggtcgacgctgttccagctgtggttccgccatccaagtctgccaagaagggaggcaagagacaagctcaagatgaaattgagaagcaattgagtgccaaaaaacag

SEQ ID NO: 9087 - DNA, 239 bp, Glycine max
  Clone ID: 701102069H1
atcgaatcgccccaagaccatcatgcggaagccgaagaaggttccctcgttgctgcaaaacctaaagagctacgaggagaagcaagcccatgtcgagaccctcgagaaggagctcgacgcgctgttccgctactaccaagaagtcatggctcagaaagtgcgtgtcgagctgagccagtgcggtggttcgcgaaatgttgtcgtcgcggcgctgatggaggagagcgaccttccactgt

SEQ ID NO: 9088 - DNA, 228 bp, Glycine max
  Clone ID: 701102070H1
agttctagcaagcagaatggggttgtccagccatatgtatgctaaggttgttgccttcagcaaggtcccacttccaaattacagatatgatctggatgatcggcggcctcagagggagtgagcttgtctatcaccatgtatacccagttaatgttttttgaggaatatcttggccaaaaatccagatgaacaaaagcttttcagatttgtcatctgcagatccagcag

SEQ ID NO: 9089 - DNA, 238 bp, Glycine max
  Clone ID: 701102071H1
gtcttgtagcgtgggacaccggtggttccatcccccaccaccgtttatcaacaatgccttcctcactctccctctcactcacacccctctctgtgttccctccccgcagagtccccactccttctccaaaaccctatcgcctctccgtcaaatcctccatcaacaaaccccctgacgccggcaccaccaagcccagctcctggctcagccccgactggctcacttccctctcccgctc

SEQ ID NO: 9090 - DNA, 238 bp, Glycine max
  Clone ID: 701102072H1
gtacttactcacagatatattttttttttttgtctccatcattttctcgagagctttcagtttgtgtggttcatctttcttcttctccttccctcccccctctgtaaaaccccgcttctctgaatccctttctgttaatcatctgtctttcaagctaagattttcgggtttgtctattaattcaccaagaagcaaacttagaaggatttttcgaaagccaggtgttttccagaaacga

SEQ ID NO: 9091 - DNA, 239 bp, Glycine max
  Clone ID: 701102073H1
ctaacgcgtgcatagcagagtcagagacagagacgcagccatgcggcggagacctgcgaggtgttataggcaaattaagaacaagccataccccaagtcacgtttctgccgtggtgttcctgatcccaagatcaggatttatgatgttggtatgaagaagaagggtgttgatgagtttcctttctgtgtccatctggttagttgggagaaggaaaatgtttcaagtgaggccctggaag

SEQ ID NO: 9092 - DNA, 209 bp, Glycine max
  Clone ID: 701102075H1
gggacagccacctaataaagccacctgcatgtcgaaatttccgttaacggttgcagggagcggcacttcacagaaggtctcgcttgtgaggtcgaaggcgaagatgagatcccgctcgtcaggttggagttttcgggtgacgtgacaatggagggagccggagacgaaaaacagcatggtaggagtgtgcacagaggcgctcggcatcg

SEQ ID NO: 9093 - DNA, 246 bp, Glycine max
  Clone ID: 701102076H1
caccccttatccgatcatggctactgatgcccgtcactcgcgtcgcaagtatcgccgatcatcctctccggaggacgtggacagatcctcgaagcgccacaagcaccgccaccacagccaccgccaccgccacgggagcaaaaaacgcgacgaagagattaaattcgatgatcgaacaattggtgcggttccttctccaactccgcacgggcatctccctgacgacgatgatgtggaggagggaga

SEQ ID NO: 9094 - DNA, 151 bp, Glycine max
  Clone ID: 701102077H1
gagtgaaagagaatatctgagactccgattctgagagtcgagacgagtgagtgagtgctgcttctgcttctgaatcaaatcattcatcactctctggttctgatttttctgacaccaaaatggtgaatcctcgaattccacgttcaaggat

SEQ ID NO: 9095 - DNA, 246 bp, Glycine max
  Clone ID: 701102078H1
tgaggtccgtgatagggctacactttacctggacacacttggaggtgatggttcagttgttgagactgataaagatgtaaaggacttcctgtttgggccatttgatatcccacttgtcaatctggagactagtttgaaaaactatgaaccttcagaagaaggttttgacattaactctgtgcccaaggaggtcaagtcccagccacttgcagaaaagaaagcccctggtaaaaagccaactggttt

SEQ ID NO: 9096 - DNA, 249 bp, Glycine max
  Clone ID: 701102079H1
ccgagtttttggctttagaagctgaaggcatatagttatcacaatggggagagctccatgctgtgagacaatggggttgaagagagggccatggactccagaagaagatcaaattctcatcagttacatcaacacttatggccatgctaattggcgtgcactgcccaaactagctgggctattaaggtgtggaaagacttgtagactccggtggataaattatctgcacaccggacatcaaacggggca

SEQ ID NO: 9097 - DNA, 230 bp, Glycine max
  Clone ID: 701102080H1
tagaacccttccacggtggtgactgcgcgatgggtgcctacaagtatgtttcagagctatggcgcaagaagcagtctgatgtcatgcgcttcttgcagcgggtgaggtgctgggagtataggcagcaaccttccattgttcgcttgacaaggtcgacccgccctgacaaggctcgtcgcttgggcttcaaggctaagcagggctatgtgatacggcgtgttcgtgttaag

SEQ ID NO: 9098 - DNA, 244 bp, Glycine max
  Clone ID: 701102081H1
cgaaatcacaaaccaagcttaattacccaagagagaaattaagaagctagtttgcttgtttttcggtgaactcagggagtcagatagataatactgatccctcgagatattgagattcatctaagagattaatatcatcctacccaaccacaagcttagattgaaacaagatggaagtggtggtacaaagtcctagtagtccaaccatggataatttcgattttggtggcaacatgggttcgat

SEQ ID NO: 9099 - DNA, 237 bp, Glycine max
  Clone ID: 701102083H1
ggctgccagtgttgtcagctgctccaaagcatgctccacattctttcaaaagtgctccacctcctccagagttgaaccatgtagcacagcctgctgttcagcagtcaagctctgcatctatgtatgctcccgagtcagggaccgaggcagcagaagaaggctatgcactagaagaagatgaagtaacatctgtctatgttagaaacttgcctgctaatgttactgaagtggagattg

SEQ ID NO: 9100 - DNA, 235 bp, Glycine max
  Clone ID: 701102084H1
agggctcgagctcgagcgcttctgctctctcacgagaagaatactactaactgtgttgtaatacatgagtagcgaacaagatgaatccatggaacatgagaacttccaagttactctcacaacaacttgcttatcctccttatcgcttggtagaagagattccaaacatgggaaattccagttgtgtgagcaaggagccaagaggttcacagatgccaatcttttataggtggcc

SEQ ID NO: 9101 - DNA, 235 bp, Glycine max
  Clone ID: 701102085H1
ctcaatagtagtgcttcttcacttcttccattctccgccaccgccaccacaactaccaccacggatggcggcgacggcgacggcggaagcgaaaacctactggtgccacgagtgcgacatgagcgtgtccctgactctcccaccctcccctctcctctgccctcactgccacacccacttccttgaactcatggactccccaagcctctcccaagaaaacgacgccgaatcatcc

SEQ ID NO: 9102 - DNA, 127 bp, Glycine max
  Clone ID: 701102087H1
ctcgagcgctttggtggagcagattgctgaggaaccaggaaagcttggaaccttttggccttgtgaatggctttccggtgattttcctgaggctcggctgtttaccctaacaatacaagactacatc

SEQ ID NO: 9103 - DNA, 238 bp, Glycine max
  Clone ID: 701102088H1
ttagcgctcaggttcttcctttaacccttctcttcttatgccttattaatgtttgttttattgcgacgggactctctgttagggttagggttagggttaaattcgattcggattcatcttgtcgaatttgggtacgatttccttcagtttccctcattttccgatatcgatgcttggggtttcgtttcgccttgattccctgtggtgcttaccgttatcggctcttcttagggttccg

SEQ ID NO: 9104 - DNA, 241 bp, Glycine max
  Clone ID: 701102089H1
ctggttccgaggttgtttcccagttcttgccaggcagataacaagtggtctttcatgacatacctgccggacttggacatcaagaatggcaagcgccctttagacactgatggggaggaagaaccccagccaaggaaggtgaataggagagcggattctcgccatcatggcgagaccactcggctcttgtttcaaaaacaatcgtgtcatgctgatgattctgttgttccacaaatggatc

SEQ ID NO: 9105 - DNA, 242 bp, Glycine max
  Clone ID: 701102090H1
ctcgagccgtgacattatagatcgtgtgcctaaaattgatcctgatgatacctcagcattgaagccacccaatgtatatggaagcctcgagttaaaaaatgttgatttttgttacccatctcgtcctgaagtgttggtattgagcaattttagcctcaaagtcactgggggccaaacagttgctattgtgggagtttctgggtcaggaaagagcactataatatctttgatcgagaggtttt

SEQ ID NO: 9106 - DNA, 244 bp, Glycine max
  Clone ID: 701102092H1
cttcaaatcccccctgcaattgctcatcatccttctggttttttcatttgttctctcttctgctgctctccaaacaacaatttcagggtgttgaggaattgaaaaatggagaagaaatgtttgatatggcagaagagttcatggtagagagaaggattgatttggagagtaatgattatccagggacaggagcaaacaaccggcatgatccaaagacaccaggaggaccttgagacattaatgc

SEQ ID NO: 9107 - DNA, 244 bp, Glycine max
  Clone ID: 701102093H1
cttctttcaattgcttaccagaccaagcatggaagctaccggggaaaaagcatggcattttctgcatgtggttcggaatatggaagcaaattctatgctatttaattatggcataacaaccaccttgtgtcttcattaattcctatgcaaatctccaacctagaagattaaccatgtccctttgtaagtaccctgaggctgaaatagtaaccctttatatacctttctgatctattgacatatt

SEQ ID NO: 9108 - DNA, 246 bp, Glycine max
  Clone ID: 701102095H1
cggctcgaggcttttgatcccgtccttcggaaatggtatcggtatcgcattgaacttccatgcattggaacttctaattggttcattgcttcatcatatggcatggtctgcttcatggacaatgacagcagaagtgaaatatgcatctgcaacccaattaccaaaacctacaggaagcttgaggagcctccaggtttgaaagtttctgattacagtgcattagcaatctcagtgaacagggaatct

SEQ ID NO: 9109 - DNA, 255 bp, Glycine max
  Clone ID: 701102096H1
ctggagatgtactactctctgaaaaacaagcccgtgtctagcttcacgaactggactaccattgcctctatgtagcggaatgacacatactcccgactcagaacactaggaccttatgctccctttcaagtggaatctgatgaagaagttgggcatttctcttttagatagattgaaaaacaaaaccaactaatgtatcgaaaactacttttctatgcacaataaatatgtatttagattatcttatttttaaaa

SEQ ID NO: 9110 - DNA, 281 bp, Glycine max
  Clone ID: 701102101H1
ctcgagcgcgctaaccaagaaggaactagggttttacagaatacaagctctctctctctctcgtcggttttcgtcaatcaaatccaatccaatatcaaatatgagtcgtcatcccgaggttaagtgggctcagaggcttgacaaggtctatatcacggtgcaattggctgattcaaaaaatgcaaaagtggatcttacgccagatggtatttttaccttctccggtagtgctggtgctgaagaccatcagtatgagctaaaactggagctctttgataagg

SEQ ID NO: 9111 - DNA, 273 bp, Glycine max
  Clone ID: 701102103H1
ctctagatgagaacccttttgcacaagaaactcaacgggcctcattcggaggatctgctgagagccaaccctgtcttcatgccaagaggattttagttgttggttgccccattagataggtattttatcttaagccacaacaaagctctgaccagttgaccctgacagggtggttggaaagagctccacagcttagtagattcaaggttccaattgaggctgctgaaagattgatggacaatgatcttgtcctggagcagtatctgtctcctg

SEQ ID NO: 9112 - DNA, 276 bp, Glycine max
  Clone ID: 701102104H1
ctcgagccggtctacacctaattagccaaacacaccacagcaccaaactagttggctcaattctctttgaatggctttggaggctttgaattcaccaacagcagccaccactcccttccgtggttaccaagaagaggaggaggaggttgaccttcacctacgcgagccttgggccaagagaaaacgctccaaacgacctcgttttgagtcggaggaagagtacttggctctttgcctcatcatgcttgcacaaagcggtaacaacaacaacaccca

SEQ ID NO: 9113 - DNA, 274 bp, Glycine max
  Clone ID: 701102105H1
caaaaacttaagttcattccttgtgttttgctttcttcctcaaaaccaaacatgtcgaacacatgcggcaactgcgactgcgctgacaagactagctgcaccaagggaaacagctatggtgttattgtagagactgagaagagttacatcgagactgttgtcatggatgttccagcagctgagcatgatgggaagtgcaagtgtggcactaactgcacttgcacggactgcacctgtggccattaaggaatatgtatgacaatgtaattgccat

SEQ ID NO: 9114 - DNA, 272 bp, Glycine max
  Clone ID: 701102106H1
cgaagagccggaaaaggactccgcctcgtcggactacgatcttaaggctattccggggaaagcaatttatggagctagcgacgcgctaccaaaccctaagcgcgtgaaagccgacgagtcaaggcgcgcggtggtggtcgttgactcgcaggagaacgggatccgcctcgtgcacagcctcatggcgtgcgcggaggccgtggagaacaacaacctcgccgtggcggaggcgctggtgaagcagatcggcttcctcgctgtgtcgcaggttg

SEQ ID NO: 9115 - DNA, 273 bp, Glycine max
  Clone ID: 701102107H1
gctgcaatggcttcaagtcaggaggaggtgacccttttgggagctactggaagcccatttgtgtgcagggttcatattgccctcaagttgaagggagttcaatacaaatatgtcgaagaaaatttgaggaacaagagtgaactgcttctcaaatccaacccagttcacaagaaggttccagtgtttattcacaatgagaagcccatagcagagtctcttgtgattgttgaatacattgatgagacatggaagaacaaccccatcttgccttct

SEQ ID NO: 9116 - DNA, 271 bp, Glycine max
  Clone ID: 701102108H1
gaaagcttgaagcaagtgatgccatctagtattcaacccaactcgtttaagactgtgagttaatgtttgtccctggctcttaaccatcattttttttgtctcattgcaatgaatgtaactaggatgattttacaaatttctgtaggtagtgtgtggaggattagctggatctacggctgctttattcacgactccttttgatgtgatcaagactagattacagacacagattcctgggtctgcaaatcaatatgatagtgtgctccatgcc

SEQ ID NO: 9117 - DNA, 272 bp, Glycine max
  Clone ID: 701102109H1
cgtgattatggattgatcaataacattcaccatgacattggaactcatgtcattcatcacctatttcctcaaattccacactatcacttagttgaggctactgaggcagctaagccagtgtttggaaaatattatagagaaccaaagaaatcatctcctcttccttttcaccttattggggaattaataaagagcttcaagactgaccattttgttagtgacaagggggatgttgtgtactatcaaactgactctgagattaatggctcgtc

SEQ ID NO: 9118 - DNA, 267 bp, Glycine max
  Clone ID: 701102110H1
ctggccaaacagcagggtgaagtggtagtggactctatatagctaagttttgagtaggaaattgtgttactgcgggaaggtgactttagggaaacaattatatttaatcgcaacgtttggcttagcgaaaattaaagtggtgaatgactagcgtgaagtgttcttttgagaaacttatgattggatgagaacatcctctattatgtacataagtgtcagtgtcattgcatttgggtttcctggaatgatcttttgatggattgatgt

SEQ ID NO: 9119 - DNA, 268 bp, Glycine max
  Clone ID: 701102111H1
aaacaaggcatttcaattatcgtgtcttcttggctctctgtttaggatcgacatggatttcttttttccattggcaatacttgtgatgatattaggcacaccatactctagtgcttctggaaagagtgaaagtaatgtgaaaacagctgtttttctgtctcctaagtttgaacttggaccgggatcggttgcaaataaatatgattatgatattgattttccaagaggtcatatagcacttaagagtttcaatgcagaggtagttgat

SEQ ID NO: 9120 - DNA, 271 bp, Glycine max
  Clone ID: 701102112H1
gcaagagagaggttgggaaagactgcaatatattctctcatgcaaaagaaagcaccaaaaaaagtaagggagaatttaattccttcccacccttcaacaaaaactggcatgagggggagcaacctttagaagagacaacattttcttttccacttctatttaattattactactttaaattcatctcttatatagctcaacctatatctcagtcttccccggtccatcttgttcggtttctgttccatttcttttttatagcagcataaga

SEQ ID NO: 9121 - DNA, 269 bp, Glycine max
  Clone ID: 701102113H1
cggagatgaaggatggagcccaagttgtgctgaatgataatggtaactacggcaaattctcacacctacttgcttcccaagatcgtgattatcttctctctccaactggggctcaggtgaaagtttctgatcttgaagggagagtagtgggtctattattcgctgcgaattggtacccaccatgccgtggattcacccaaatcctagttggaatctacgaggagctgaaaagcagagtccctcaattggagattgtgtatgtgtcctct

SEQ ID NO: 9122 - DNA, 270 bp, Glycine max
  Clone ID: 701102114H1
agatttgactcttgaaactcaacaaaaaagaagagctagaaaccatggtaaaggatagaaaggttggtgttgcattggacttctccaatagcagcaagattgctctcaaatgggccatcgaaaacttggctgataaatgccacaccttttacatcatccacgtcaatcccaattcttctgatgatcgtaaccagttgtgggcaaaatctggttctcctcttattcctttgacagagttcagagaggaagagattatgaagcactatggcg

SEQ ID NO: 9123 - DNA, 269 bp, Glycine max
  Clone ID: 701102115H1
ggaaaaatcactctcatctgagaatccaaacctcctcctaatttaagtggtgggtcagctactatggcttcgtctctgttactagcggtggtgtttgtgcttgatctggttgcttttgctctcgctgttgctgcagagcagagaaggaatactgcctcgttaaataaagacagtgcaggtagaaactactgtcaatatgactcagacattgcaaccggcctaggtgtggggtccttgtttatcctagttgccagtcaggtgatcattat

SEQ ID NO: 9124 - DNA, 272 bp, Glycine max
  Clone ID: 701102116H1
aaacactttttttattgccacgtcacttatgataattattcacttcgttttgggaattaaaacgatggagtgagccaattggtctcaaaatctctcggcttttgcttcaattcagaccacacgtaaatgacacagaggggacaataatttattttttgttatctcttttttaattttaggttaatattagactcttaaagtctcataactgaacagttcaatgcagaaaacttctggaaatattataggccattttcttggaggtttatatt

SEQ ID NO: 9125 - DNA, 280 bp, Glycine max
  Clone ID: 701102117H1
cggaagacagagaccgagagagagatatcgagagaagacatatacactgccaagaagaagaacatgaaaattcagtgcgatgtgtgtgagaaagccccggcaaccgtgatttgctgcgcagatgaggcagctttgtgtgccaaatgtgacgttgaagttactgctgcaaacaagcttgcaagcaagcagcagaggcttctccttcaatctttatgtaacaagcttcccagatgtgacatatgtcaagataagccagctatcacatattgtgttgaggaca

SEQ ID NO: 9126 - DNA, 259 bp, Glycine max
  Clone ID: 701102118H1
cgtcgaccacaatttcgaaggggaccaccaccacgccctcgccaccgacgccatgcccggtgccctcgctgccgccgatcctctctgtgccgtctgcgccacgccagcccctaagaagtgctcgcgctgcaaagccgttagatcttgttcgcaagcctgccagcagtctcctcggatgtcatccgactcgccagtgtgcaaggatactcgtgagaccactgcaagacgctcggctcagaatggggtccttcatcgtggg

SEQ ID NO: 9127 - DNA, 275 bp, Glycine max
  Clone ID: 701102119H1
ctccctttcctctccgaaccctcgatcactctcacgcgctcctatattcgctcctccaccgtcgctctctcgaacaaccacaacaccatcttcatcacatggcaaacgcagcatctggtatggcagtccatgatgactgcaagttgaggtttttggagctgaaggcaaaaaggacacaccgtttcatagtttttaagattgaggagcagcagaagcaggtcattgtggagaagcttggtgagcctgcccagggctatgaagatttcactgccagc

SEQ ID NO: 9128 - DNA, 273 bp, Glycine max
  Clone ID: 701102120H1
ctaatctattaggcgctgttctctcgtcttctacaaaattttctgttcgatctcaaccaaggttgttccttccaccgccatgagtttcatcttcggaaagcgaaaaacacccgcagagcttctgcgggaaaataagaggatgctggacaaatcaatcagagaaattgagcgcgagcgtcaaggcttgcaaacgcaagagaaaaattgattgcggagataaagaaaagtgccaaacagggccagatgggagctgttagagttatggcaaaagat

SEQ ID NO: 9129 - DNA, 270 bp, Glycine max
  Clone ID: 701102121H1
gttcacagagagaatggctgcggaaaacgttgttgagttcacagacttacccgtcaagaggccaagagaagaagaagaaggaaccaatggcgtctccaacgacgccgtttcagcgctccccaatgaccctcaataccctggcatctctgcggttattcccggttggttctccgaaatcagcccaatgtggcccggtcaggcacattccttgaagatggaaaagattttgtttcaagggaagtctgactatcagaatgtcatggtcttcca

SEQ ID NO: 9130 - DNA, 270 bp, Glycine max
  Clone ID: 701102122H1
cgatgatgctcagaattcgtagccgcgatggcctggagcgagtgagcgtcgaaaaccccctcgccacaacagtctcggacctaaaacggattatccaaacccaattgggaatcccggttcacaaccaaaccctctccaccaaccagaacctcctcttggccaaatccctcgaagatctcctccgattcaccgacatgtccaacctcgatgcgtctctctcgtctcttaacctcggccacggctccatcgtcttcttggactacgagggcg

SEQ ID NO: 9131 - DNA, 270 bp, Glycine max
  Clone ID: 701102124H1
aaaaacctctctcagagtttgctcacccctactcttcttccagtctctatctcaatctccatcaaatttaactatggctactgaagaggttttggttgatcaaatcacttaccctaccaagatcactactaccaagcccctatctttgcttggccatggaatcaccgacatggagattcacttcatccatgtgaaattctattcaatcggggtttatttggagccagaagtagtaggccacttggaccagttcaaaggaaaatctgcaaa

SEQ ID NO: 9132 - DNA, 266 bp, Glycine max
  Clone ID: 701102125H1
aatcccagctctatgagaccttcaccattgcaaggtctaggactagatttgttcatatttgtctgagccactttcttcaatacggacgtcaagtacatttaaaaaatcagctctattcgttgtggtattcgaaaaaggaggtttaagatcttcaaataaattgtgattagaacaaaaaatgcgaggcttaagatttagcattagaaccaaaaaaatgtgataggttttaaatctggtattgtggaacatataacaagttatttaac

SEQ ID NO: 9133 - DNA, 268 bp, Glycine max
  Clone ID: 701102126H1
ctaaaacaaactttgtgtagttaaaaattagaatgatgaaaaacaatagcccacaagattggcctgagccaatagtcagagttcagtccttgtccgaaaggtgcacagattcaatccctgagaggtatatcaaacccctcagtgaccgtccatctgatgatgccgttgctgttgatgatgccaacatcccaatcattgaccttgcagggctttatggtggtgacccagatgctcgagcctccacactgaagaaaatatctgaggcttg

SEQ ID NO: 9134 - DNA, 265 bp, Glycine max
  Clone ID: 701102127H1
gaagaaaccaaatgctgctatacgtgatgctgacactgccttgaagattaacccagactcagctaaaggctacaaaatacgaggaatgtcaagggctatgttgggactatgggaagaagcagcaagtgaccttcacgtggcttcaaagttagattacgatgaagagattagtatggcacttaaaaaggttgaacctaatgcctctaaaatcgaggagcataggagacaatatgaacgcttaagacagcaaaagcaacagaaaaga

SEQ ID NO: 9135 - DNA, 264 bp, Glycine max
  Clone ID: 701102128H1
cgcagatccaccaaccgttatggctgccttcagcggtgatgaaacggctccgtttttcggcttccttggagccgcagctgccctcgtcttctcctgtatgggagctgcctatggcacagcaaagagtggtgtgggcgtggcttccatgggtgtgatgagacctgagctggtgatgaagtctattgtccctgttgtcatggctggagttttgggtatttatggccttattattgctgttattatcagtaccggtattaatccaaa

SEQ ID NO: 9136 - DNA, 269 bp, Glycine max
  Clone ID: 701102129H1
cttgttccgcatctcctacccctctcctctgctgcatgcaaccatgaagattttcaacccctccaaatcgtttctccagaacgtggtgtgtcctttcgacaccctcttcatcattaaaaggtttaagcccttcgatctgggtctctcccacctccaccaattccaattcctatcctactattgaaaccaaatccctcgttcatctcacccacatcgctatcttcattcaccacaccccagcctccaaatggaccggcgatcgcatccca

SEQ ID NO: 9137 - DNA, 155 bp, Glycine max
  Clone ID: 701102130H1
aaaattaatcatcttacttatttattctccgaaaatggttgatttacattggaaatcaaagatgccaagttccgacatgccttccaaaactctaaaactctctctctccgacaacaagtccttaccctctttgcaactacccttccgcaccacag

SEQ ID NO: 9138 - DNA, 266 bp, Glycine max
  Clone ID: 701102131H1
cggctcgagttcagatgctcctccagtgagttgcatagtttctgatggtgtcatgaccttcactcttgatgctgctgaagaattgggtgtccccgaggtgctgttttggaccactagtgcatgtggatttatgtgttacgtgcaataccaacaactcattgaaaaggacctaacacctctcaaagactctagttatatcacaaatggttatttggagactaccatcgattggataccaggcattaaggaaattcgattgaaggata

SEQ ID NO: 9139 - DNA, 267 bp, Glycine max
  Clone ID: 701102132H1
ctcagatatcggctgaggagcaggatgaaatgatgacgaacttggagcgccgagaaactgagtacatgaggcttcagagacgtaaaattggaatggatgacttcgagcagttaacggtgattgggaaaggtgctttcggtgaggtgaggttatgtcgtgctaaaggtacgggagagatttttgccatgaagaaattgaagaagtcagagatgcttagtcgtggacaggtggaacatgttcgatctgagaggaacttgctggcagagg

SEQ ID NO: 9140 - DNA, 234 bp, Glycine max
  Clone ID: 701102133H1
gaatcatatttcatttatttgttctcacatttctatttagtatgtctgctcttgttacctatttacccgtttaatgtattagtctagttgcattgcatcgagactaatacattaaacgggtaaataggtaacaagatcaccatactaaataaaaatgtattagtctcgatgcaatgcaactagcaaatttcagtttgcttgacttgtttgtacttaaaaacaaacaccaaaagg

SEQ ID NO: 9141 - DNA, 275 bp, Glycine max
  Clone ID: 701102134H1
ctctcagattcagcaattttctattttctcctctcatggcttcagattccaaaaaggatttccctgctgatgacaaagctggaacagaagagagtaaaacatccaaagatgagacttcatctaaagattctccagcagaacaaagagcgacagtacttttggacctagacctggacctgctgggcatccaggcaacccttttgatctctcagcaatgtctggtctgctcaatgatccaagtatcaaggaattggctgaacagatagcaaaagatc

SEQ ID NO: 9142 - DNA, 273 bp, Glycine max
  Clone ID: 701102135H1
caaagttagttagaaattgaaagggaaagggaaacgaaaatgagtagtagggtttggtgtgtggtgatggtatcagcgttggcgttgatgttacaatggcacgaagcattcagctcctacgctggctccgcaagtgcgatcatcgacccttccaaggtcaaacaagtttcgtggaaaccgagagctttcgtttacgagggttttctgacggaattggaatgcgatcacttgatttccatcgccaaatcggagctcaagagatccgcggtggcc

SEQ ID NO: 9143 - DNA, 270 bp, Glycine max
  Clone ID: 701102136H1
cctcgagcgaatcggctcgagctgaagggttcagcagttaaggacaagagacgaagattctgagctcggaaccattgcgctggccatggcttccaaccatcttcgaaacctcaatcgcatctccatccaccattttcaggctctcctcaacgatactaccaggttcttctccgacgctgcttcttcattgcctcaaccgcaacctccctcatcatccttgaagcacaatgagctcgccaagttcgccgccatcgccgatacctggtggga

SEQ ID NO: 9144 - DNA, 271 bp, Glycine max
  Clone ID: 701102137H1
gctaccaaagctttagagtgtacaaatatgagtaagatcctggacagggtggtatctgtggagtatgctctgagggatgatggtgagaggggtgacaattatgacagtcctagaagaagagggggttatgagagatcacccagtccttatcacaggcgaccaagtcctgactatggtcgtccacgcagccctgtctatgataggtacaatggtggtggaccagacatgcggaggagtcctgattatggcaggcacaggagtcctgactatg

SEQ ID NO: 9145 - DNA, 272 bp, Glycine max
  Clone ID: 701102138H1
ctcgagccgtccgagttgggcagcttgttattctcagtgtacctggagaatttacaacaacggctgggaggcgtcttcgtgatgcagtgaagacagtgctaagtggtaacaaaggctttggtagcaacattcatgttgttatagcggggttgactaatacttattcacagtatgtgactacatacgaagagtaccaggtgcagagatatgagggtgcttccacactgtatggtccacacacactgagtgttctacattcaggagtttacgac

SEQ ID NO: 9146 - DNA, 269 bp, Glycine max
  Clone ID: 701102139H1
gaaacagctatggaaggagaaaatggaaagaagctgaaaatactgtgcctccacggattcagaacaagtgggagttttcttaaaaagcaaatcagcaaatgggatccttctctattcattcaatttgatatggttttcccagatggtaaataccctgctcggagggaagtctgacatagaaggcatcttccctccaccttactatgagtggtttcaattcgaaaaggacttcacagtgtactttaacttggaagaatgcatctcatact

SEQ ID NO: 9147 - DNA, 266 bp, Glycine max
  Clone ID: 701102140H1
ggtaaaataattggagagcaaatggacttcgacacccttttgacctttattaatgagttaagtggtcacatcgatcttgatgcaaccctcagagatgctccggctctatgtatatgtgccggtgagaacggtgctgctcgtataccccctggaaccccaccgtcgttgcctcatgaagatggttctttttacgcccaacaagaacaagatgagatattgtaaatagattcatatttatcataaattttttggtgatacttgaatat

SEQ ID NO: 9148 - DNA, 268 bp, Glycine max
  Clone ID: 701102141H1
ggaagtatgaaatatcttgaggatgatttccccaacattttctctcattcctctctgtcctctgaagaagagttgaatcctttcaagaatcatcagaacatgttggctggtttagactatgttgttgcccttaagagtgatgtatttctctacacttatgatggaaatatggcaaaggccgtacaaggtcataggcgctttgaagacttcaagaaaaccatcaatccagacaagatgaattttgttaaacttgttgatcagttggatg

SEQ ID NO: 9149 - DNA, 265 bp, Glycine max
  Clone ID: 701102142H1
cctcgagccgctcgagccgattcggctgagttgacatttatgatggtttacgtgtggagcaaacaaaaccccttcattcacatgagcttcctgggtctctttactttcactgctgcctaccttccatgggttctcttggggttctctgtactcgttggtgctagtgcttgggtggatctactggggatgattgctggtcatgcatattattttcttgaagatgtttatcctcggatgacgggtcgtaggccgctaaaaacaccat

SEQ ID NO: 9150 - DNA, 266 bp, Glycine max
  Clone ID: 701102143H1
ggaagagagaaagaaggaaaatattgaagctcttgcaattctcatgaactgtggagtcgtgttgggtttctattgttggggttgggagttcttaactgcccttcttctcttctcttctcatcaaccttattgatcattctcttcatcctcctcttcttcttcaaaaaccaatttctttttatatatatacaaataaggaagacatcaaagaaaaaaatagcaaaatatttttttaaaaatatggaaggaacaagtgcaaaggggtt

SEQ ID NO: 9151 - DNA, 268 bp, Glycine max
  Clone ID: 701102144H1
gaggcagagaggtgtgcatgtgaatgctgttaggcccatcatgaataataatcctcccaatgttgaagatgtagctgcagctgcaatggggaagaagaaagtgaagaaagagggtgagcagaaggtggggaatattatggtggaggaagaggagataaaggaaagtagtactagtagagacagcatggtgggtgggtatttgcagcaacatcaacaaggtggcatgctgatgggttggaattgggaggagaatatgaatatgccattg

SEQ ID NO: 9152 - DNA, 265 bp, Glycine max
  Clone ID: 701102145H1
cggctcgagaaattttgctgttcccaatttgtttcggatctgtgttgacaaaccctaaccctgaggagtatgagtggttattgagattgaggaattgacgaaaaggaaaggaaagggggagatgtacctgaagaaaccgctatggagtgaaacagggaaagacgatggtggaagtgcaaagacagaagaagaggatcatggtgatggtgcagtgagtgaggtcgtgaagtcactgcagcaacagagagtgtatagagaagtcact

SEQ ID NO: 9153 - DNA, 260 bp, Glycine max
  Clone ID: 701102146H1
ccaaacatccatatcaaactcatcatcatcctagctttcttaatttccctctctttaacaaacgtcgtcgtttcagctcgactctttcccaacgtctcctcctggctcaacgcccacgcccctactggaggcgcgtgggatgcctttctcaactttaccggttgtcaccgcggcgacaagtacgacggcctcgccaatttaaaatcatactttgaacgattcggttacttccctcacgcgccgccctcctcgaatttctc

SEQ ID NO: 9154 - DNA, 269 bp, Glycine max
  Clone ID: 701102147H1
ctcgagcgaatcggctcgagggcgagtcagagaaaccctaggtcagaagaacagatgcccgctggtcatggtttgagatcccgcaccagagattccttctctcgtcctttcaggaagaagggaaccatcgccctcaccacatacctgagaacctaccacgtcggcgactatgttgacgtcaaggttaacggtgccgttcacaagggaatgccccacaaattctaccatggccgcaccggacgcgtctggaatgtcaccaaacgtgctgt

SEQ ID NO: 9155 - DNA, 267 bp, Glycine max
  Clone ID: 701102148H1
gagaatgctaatgttatcatggctacatatgaagatccactacttggtgatgttcaggtctacccagagaaaggaacagttgctttttctgctggtttgcatggctgggcttttaccctgactaactttgccaagatgtatgcatccaagtttggagttgatgaaggacagatgatggaaaggctctggggtgaaaacttttttgatgcagccacaaagaaatggaccagcaagaatagtggttctgctacctgcaagcgtgggttt

SEQ ID NO: 9156 - DNA, 275 bp, Glycine max
  Clone ID: 701102149H1
gtattatttcatcgattctctcccttctctttccctctgcgacaccagatgatggagacgacggcgaacgacaacgctgtcgttgcgccaatcgcggcgttgttgttggtggtgctactcgcggcgagtgtggtggtggaggctcaggagaactcggacgtgaagacgctggtgaagcacatgcacgggaagaagtactgcgacaaaggatgggaatgtaagggctggtcaatttactgttgtaacctcactattactgattatttccagaccta

SEQ ID NO: 9157 - DNA, 271 bp, Glycine max
  Clone ID: 701102150H1
gtcaagaggtcctgatggaagataacctggccgatgatgacatagaaattgaattgtctcctatagctgtccaattagcctatgttcaccagcttcttgggcgtaacaagatgctattgaagcttatacagacgtgattaaacgagatatggctgatgaatcatcaatcgcggtggcagtgaacaatcttgtttcactgaaaggtccaaaagatgtttctgatagcctaaggaaacttgatcgacttaaagacaaggagaatcaaagcttc

SEQ ID NO: 9158 - DNA, 267 bp, Glycine max
  Clone ID: 701102151H1
aaaaaagtgtgaagtgcagagggatcattgacctgctgcgacgaacacgacgtcgtttttgtttccctctgtgagtgatgggattcttcaaaagggtagctggatttcttgggtttggaaaccacaaacacgattccaaggatgagaccgacgacggtcaacctcgagtgagagaaaccgtcgtcgatcgcccccacctcgctcccgttctcactccctctacttccggcgacggcggaattcagggtctggattggtatgtaaatc

SEQ ID NO: 9159 - DNA, 268 bp, Glycine max
  Clone ID: 701102152H1
ctgagccgattcggctcgaggaaaagacctcttcctccactcaactatttcatagttgcccaattgtttattaacggctttttaagttgcagtgttcagatgctcaggttttttggaataggttacagctctcccactttggccactgctatgtctgatttaatccctgcttttaccttcattcttgccatcgtcttcaggatggaaaaattggattggaaaactaacagtactcgggccaagtccattggcacattggtatcaatca

SEQ ID NO: 9160 - DNA, 268 bp, Glycine max
  Clone ID: 701102153H1
tggcgatccatacattctacacaccaatgtgttcagccaaggcaagggcaacagagagcaacaattctatctctggtttgacccaactgcagatttccacacttattcaattctttggaatccccaacgcattgttttttctgtggatggcacccccatcagggaattcaagaatttggaatcaataggagttccttttccaaagagccaaccgatgaggatatactcaagcctatggaacgctgatgattgggccacaaggggtgga

SEQ ID NO: 9161 - DNA, 266 bp, Glycine max
  Clone ID: 701102154H1
aagatgccttgcctttacatctccaccaacattaacttagatggagttaacatcgatccaatcttttctcaagcaaccactgcagtctccacaatcatcggcaagccagagaagtttgtgatggtcatattgaaggggtctgtgccaatatcttttgagggtaataaagaaccagcagcatatgctgagatagtttcaatgggtggtataaattcagaagtgaagagaaagctaattaatacccttggcaccatattgcagtccaa

SEQ ID NO: 9162 - DNA, 142 bp, Glycine max
  Clone ID: 701102155H1
cgctgctccttgcagctctaattctatcccctcaagttcttgcaaactatgagaatcccccagtgtacaagcctcccactgagaaaccaccagtttataagcccccagttgagaagcctcctgtttacaagcctccagttga

SEQ ID NO: 9163 - DNA, 268 bp, Glycine max
  Clone ID: 701102156H1
caacttcatcaaaccaaaaaacacaacaaaagaaagaaagaaagaaacaaagagttccttgctttgtagtaagatatatcatcaaaaatggttttgtcttggactagaagaaacgttttccgccgtgcaaagaaggagaaggaacaaagtcaactattagaagttgaggttgtgattcccaaccactttcgctgtccggtgagtttggagctgatgacagatccggtgactttatcaaccggcattacctacgaccgtgtgagcatcg

SEQ ID NO: 9164 - DNA, 262 bp, Glycine max
  Clone ID: 701102157H1
ggaagttttgccgtttgaatctatagaatagaatcaaaccaaattgaaagaagatcgatcgatcgatcgatggctctggtcggagttgaagtgaagcatgccgcggagcccgcaccggaggagaattgctccgccaagcccaccaagcagggcgagggcctccgccactactattctcccaacatccacgagcatcagctccttctccgtcaaaagacgcataacctcaaccgtcttgaggctcagagaaacgagctcaatt

SEQ ID NO: 9165 - DNA, 262 bp, Glycine max
  Clone ID: 701102158H1
tgaagtgttcggattgcggcggaggagaagaaggttgttccggcgaaggggaagcactaccgcggcgtgcggcagcggccgtgggggaagttcgcggcggagatccgcgacccggcgaagaacggagcaagggtttggctggggacgtttgacacggcggaggacgcggcgttggcgtacgaccgcgccgcctaccgggtggggacggtgcaagagcaagtggggagtcaagtggcagagtgtacacgtggcgagcagttat

SEQ ID NO: 9166 - DNA, 266 bp, Glycine max
  Clone ID: 701102159H1
acttccctttgttctcaaaccttatcccttatcctcccaaaaccaaaccatgtctacctccgcagcttctctcgcactcccaaccctcactctccgaactcgacaacctctctgttctccccaatgcttctcctcgtccctctccctcacccctaactccaaacccatttccatttccgccgttttcctcaaaacaacgctgtcgtcgtcgtcgccgttgtcgctgtcgtctcgcttcgttccccatgtctctgtgttggagcagg

SEQ ID NO: 9167 - DNA, 251 bp, Glycine max
  Clone ID: 701102160H1
cggctcgacggacaagacaggagcgacgattatcctctttccattcgtcgttcaccttcacttctcgtacgcttatttcgtagttgtttattattgtagtgtattcttctcttctgggtctgggtggctgttgacagattatagattagatgatgtgatgtgaaagcactgcatgagtagtttttttggattgatttgtttgtgaggtgagcgcaacagagagacagagagcgagagagcagagcagaggg

SEQ ID NO: 9168 - DNA, 265 bp, Glycine max
  Clone ID: 701102161H1
gaccaaatggtagtattgatcgctataaggctcacttggtggacaaaggatacactcagatttttggccctgactacagggacaccttttccccaatggccacaattgctcatgtccatcctcttcttgctatggctgccattcaacattggtctcttcaccagctaggcataaaaaatgccttcttgcatggtgagttgcaagaattttatatgtctcaaactccaggttttatagtttcaggtgactctcggttaatttgttg

SEQ ID NO: 9169 - DNA, 279 bp, Glycine max
  Clone ID: 701102162H1
cggcattcggctcgactcgagcgaatcggctcagaaaaaaagggggggaaatttcaacggcgtcaagggtttctctgaaggcgaagggtaagagttcaaagggatcgaaggccgcggaagatcgatctgcgagcgagtgcctgaaggagtggacgacatgggcaatgcgaaaagcgaaggtcatcactcactatggtttcatccctttggtcatcatcatcggtatgaactctgaccccaagcccccactttcccagcttctcagccccgtctgatcta

SEQ ID NO: 9170 - DNA, 267 bp, Glycine max
  Clone ID: 701102163H1
gggaatcttcttccatggcctccaagcggattctgaaggagcttaaggacctccagaaagactctccaacctcttgcagcgccggtcctgtagcggaagatatgtttcattggcaagcgactataatgggtccccctgatagcccttatgctgggggtgtttttctagttactattcattttcctccggattatccattcaagccacccaaggttgcatttaggactaaagttttccacccaaatatcaacagcaatggtagtattt

SEQ ID NO: 9171 - DNA, 269 bp, Glycine max
  Clone ID: 701102164H1
ctataataaagccatggaagctcaaacctggttcttggttattgccttattcctcttccttctactcaatcggcttgcaaaatatctcaagccaaaacctaatgctggtcacaaacttccccctggtccaaaaaagctacctctcgtaggaaacatgcatcaactagcagcagcaggtccactcccacatcgtgcactccgagaacttgctcataaatatggacctctgatgcacctccaacttggtgagatttctgcagtggtagtat

SEQ ID NO: 9172 - DNA, 270 bp, Glycine max
  Clone ID: 701102165H1
ttcggctcgagtctcatcccagtttcactttctcattattttctctcctattgataaagaaacagagagagagagcaaaaaatgcctgcggtacgaggtattagcaacggagggggcaatgagtaccctggaagcctcactccttttgtgacggtaacatgtatacttgcagccatgggtgggttactcttcggttacgatatcggaatttcaggtggggtgacatccatggatccgtttctgctcaagtttttcccgtcggtgttccgg

SEQ ID NO: 9173 - DNA, 273 bp, Glycine max
  Clone ID: 701102166H1
acaaaagttggtagcttccttccttcttcaaacgcaacgaagtttctttccactttcaaaattcccaaccgcccctttgttctctccgtacaacatcatcacccctgattctgggtcatttaaatccccgaatttcatcattcgttattttcatcgtttttttgcctcttatttcatccaattctcgctttttcaacgatcacagtgttgacccttgatgggtttttctcgtcgatcataagcatacccgggtttgtgaaaaaggtttctcct

SEQ ID NO: 9174 - DNA, 271 bp, Glycine max
  Clone ID: 701102167H1
atcgatgttccttcattctttctctgccccatttcgttagaaatcatgaaggatccagtgacggtctcaacaggcatcacctacgaccgtgaaagcatcgaaacatggctgttctcgaagaaaaacacgacatgccccatgaccaaacagcccttgatagattacaccgatctcacaccaaaccacacccttcggagactcatccaagcgtggtgtaccatgaacacttctcacggcatcgaaaggatcccaacccccaaaccccccatta

SEQ ID NO: 9175 - DNA, 268 bp, Glycine max
  Clone ID: 701102168H1
cctcgagccgattcggctcgagaacacaaaaaaatgaaacctacactcaccattctcttgacgtctctactacttctcatcacttcaccctccttggcaacccgacccgcatccaaccctgatcaagtcaagcacaacaaaaacaacaaccaaggtggtggtgctggtgctggtgctggcgggttctttggccctggaggagggttcagcatacccggttttggaaacgggtttggaaatggcatcataggaggaggatacggatccg

SEQ ID NO: 9176 - DNA, 266 bp, Glycine max
  Clone ID: 701102169H1
ctttgtgtataactgtgcagtgatgggatgctgaggcatttgcacttggtgaatagtgctatatggatttattctgaatggaattaacattcttcactttcaaggagagatgattctggctcttgggtaatcagcccacctttgggggtaaatatttactcctatttagagtaacagatacagttttagaaggttcacaaaactgagtcttttcattttaagttatcatgatggtttttcaaatgttggcacagtgacaggtgaat

SEQ ID NO: 9177 - DNA, 266 bp, Glycine max
  Clone ID: 701102170H1
ggattccttgtcatgacaaagaaattacgtttgggttgttctttgcagggggaggaggatggaaagaaagtgaataaccttctggaaatgaatagaggggaaggagcgaatgatggtttttctggacctggaccaaatgattcgcttcttcctggtcttattgatgatgttgccttgaattgtcttgcttggcttagtggatccgattatgccgcactatcgtgtatcaataaaaagttcaataaactgatcaatagtgggtatct

SEQ ID NO: 9178 - DNA, 256 bp, Glycine max
  Clone ID: 701102173H1
agaaaaatgagaagaagcatgttgatgttactactatgcttcctattgggcaaatttacgtaagggggctcattttacaaagtatttacgggatggggtctgtttcaaaagaaataacggagggggtttgttttgtggaggaaaccgccattgccactggcggcctggctcaacccgccattgccagtggcggcaaaggtggagagaagggtgtattgtcactagcagcggcgatatggccacgtaggatggagag

SEQ ID NO: 9179 - DNA, 264 bp, Glycine max
  Clone ID: 701102174H1
ctgggagatgccgttgctttaatcaaaggggtgggaaagaatttgcggaggaaagaaaggagggtacggatagagcagattagagctagtcttggcttgtcagattcacagagaacaccctcgccaggagaatccttgaaggatttctacaggcgtacaaatatgtattggcaaatggcagcccatgaacatactcaacacactggaaaagaactccgcaaggatggttttgatcttgctgaagctcggtacagggagctaaaa

SEQ ID NO: 9180 - DNA, 264 bp, Glycine max
  Clone ID: 701102175H1
ggcaagaatatcaaattggtctcttgtcttcctcctcatctctacactactccacatacagcccagcctctcaagcccaagcccaagcccaagcccaagcccgttcataaaatcctcctgcagcagcacccagtacccagccctctgcgtctcatccctctccgtctacgcctccagcatccaacaggaccctcaccaactggttcagacagcactctccctctccctgaaccgcacccaagccaccaaaaccttcggtggcta

SEQ ID NO: 9181 - DNA, 265 bp, Glycine max
  Clone ID: 701102176H1
cgagaattactccttaggcaaatcgcttacgaataaccaaatcttaaaacttgcatccaagggtccacagagaaacgctatcaacattgttctcacttctgctgacgtggcagtggaggggttctgttccagtaggtgcggaacacacggatcctccgtgggggcgcgcgtgaacggaaagagatacaagttggcgtacatttgggtgggtaattcagagacacagtgcccgggtcaatgcgcgtggccgttccaccaacccatt

SEQ ID NO: 9182 - DNA, 261 bp, Glycine max
  Clone ID: 701102177H1
cggctcgagtttacagagaagctaagaggcgcacgtcagcaaaagctcgtggaattgctagcaatggcgaggatcaaggtttacgagctgaggcagaagacgaaggctgatctgctgaatcaactgaaggacctgaaggcggagttgccttgcttcgtgttgctaaggtcaccggtggtgcccctaacaagctttccaagataaaggtggtgaggttgaacattgcccaggttttgacggtgatttctcagaagcagaagg

SEQ ID NO: 9183 - DNA, 261 bp, Glycine max
  Clone ID: 701102178H1
acgaggtggaactgaagctctcatcggcacgcgctctcaagaacgtgaactggcgccatggcccgaaccgcccatacgtcgtcgtttgggtcgacccaagcaacaagctctcgacgcgcgtggacgaaagcggcgacactgacgcgaattgggaccaaacgctcacaattccgttgccaccaaagcctctcgaggatcaaacgttgtcactcgacgtggtccacgccggctcggaggaggacaccaagccgcttatcggct

SEQ ID NO: 9184 - DNA, 264 bp, Glycine max
  Clone ID: 701102180H1
atagggccctaaaaagaacaaaagtagttatacactatgtcttcatttgtattatatgtgatgatatggattgttcatggaacttgtttagctgactgaattattttaatttagaatagctgaccgattttctttttctcacaggataatgtgcgaaatcagcttattcagtttgagcttttactcacaactgcaacatttgtggttgccatctttggagtggtagcaggaatatttgggatgaattttgaaattcaattattc

SEQ ID NO: 9185 - DNA, 266 bp, Glycine max
  Clone ID: 701102181H1
cgtcatttcatttccaccaaacaccacacccccacgtgaagtcaaatggtccttagttctgggagtgttgatgactcagtcttgccggaacgaacggaaaaggggatctcaatggacaacaccaagccccttatcgaactggaactcgacgatgatggcagaatcacaggtgcaggacatgcacgggaagatagcatgcacatcaggacaggggttttaggggcgggggtgctgtcttttgcattcgttatggccacactaggatg

SEQ ID NO: 9186 - DNA, 266 bp, Glycine max
  Clone ID: 701102182H1
ctcgagccggactaattgggttaggaacttattgctgacaggatcgcctcttttgtggcaccctattccttatgttctgtttccttaacacagttgcgattgcttatagtgcaactgctgccctgccatttggcacaattgtggtgattgtcctaatatggacattggtaacttcaccattgcttgtgttgggtggtattgctggtaaaaatagcaaaactgagttccaagcacctgtccgcactacaaactatccccgagagatt

SEQ ID NO: 9187 - DNA, 267 bp, Glycine max
  Clone ID: 701102183H1
cggctcgagaaacaatgcgcttgtgggaagttttatggacacattatccgtctgagcatctgcacctgtatgtatgtgtggcaatcttgaaacgatatcgtggtaaaataattggagaggaaatggacttcgacacccttttgaagtttattaatgagctaagtggtcacatcaaccttgatgcaaccctcagagatgcagaggctctatgcatatgtgctggtgagaacggtgctgctcgcatacctcccggaaccccaccatcgt

SEQ ID NO: 9188 - DNA, 267 bp, Glycine max
  Clone ID: 701102184H1
ggaagatacactggcaatgagaaaagagattcaagatcttaggacaaatgctcgaatttttcagcttagcaagtgcactgcatgcaccttcacccttgatttgcctgccgtgcacttcatgtgcatgcactcattccacctgcgctgccttggtgataatgaaaaagaatgccctcagtgtgcacctgaatataggtctgtcttagaaatgaaaaacaatttagagcaaaattctaaggatcaggacagattttttcagcaggtgaa

SEQ ID NO: 9189 - DNA, 259 bp, Glycine max
  Clone ID: 701102186H1
gttttctcatcatcatcgactttctctcttatgcaaggcaggttctccttctccgatttcaatttgattgaacgagtagtgttaagattatgatattttttgagaagcttcgtttctctcctcacctaagccgcttcattgccggcatcatcttgttaattttctgcaattcattccagttagtccccaatttccccattcctatacatccttagattctacgtcgttaactctctccgatttgattctatattcgata

SEQ ID NO: 9190 - DNA, 265 bp, Glycine max
  Clone ID: 701102187H1
cggctctgatgctcggtgtcgccgtcgtttgcctccacggcgcgttccgcgtgccggaggatctgttcctcgacgatcaggagaattctcaggctaccggattcctctccttcctcaccggccctgcctccgccgctgccgccgccgccgccgccgccgccgcttttcccagcgttgcctcacgcgtttaggtaagaaataaaaaatctcagtgagatcgtcagatctggtgctgtttctccccgatctgatgagttttgacgcc

SEQ ID NO: 9191 - DNA, 262 bp, Glycine max
  Clone ID: 701102188H1
cgttattctcttattcatccttctcttctgaataatccagatctctttctgcccttttctccgtcacgcttttcgtgaccggatctgtatggatttgatccagatctacacgccgatggtggttttggccgggtctttcatagatctggtgcgtagaggctcagatctacggtaccgaggtacaacagagaatcgatgacaagaacgcagatccgacggtagatccagccgattccgcttgttcgatcgctacagacccctg

SEQ ID NO: 9192 - DNA, 262 bp, Glycine max
  Clone ID: 701102189H1
aaaacactctgacacaacaaacacaaacacaatcgtcaattaaaacaacaacaatatcgaagctgcacaaattaatatccaacactctcaagctttcgagtttcaaactctgggcgctgaatttggttcatttttctaagagttatatatacttttattgaaattgttgcggttcaagtctgaactaaaacattaagtttgcggaggctggtgcttttctgatttgccagtcaaattattaaatcacttgttcacatagatc

SEQ ID NO: 9193 - DNA, 262 bp, Glycine max
  Clone ID: 701102190H1
gaaaaagagggagagtataataagtactgctcttgttacctctcgtagctctctggatcaaacatggatgctgacagccttcttgcaaggtgaatccatggcacaaagaacccaactagcacccgatcaagtgaatgaaattaaggcagaatacagatttcccctcttgtggagctcattcaaagaacggagcatcttgaaaaaggatttcagacagctcttttccctcttgtagaggactcagaaaggaaatcctggccga

SEQ ID NO: 9194 - DNA, 260 bp, Glycine max
  Clone ID: 701102191H1
aaaaaagtgtgaagtgcagagggatcattgacctgctgcgacgaacacgacgtcgtttttgtttccctctgtgagtgatgggattcttcaaaagggtagctggatttcttgggtttggaaaccacaaacacgattccaaggatgagaccgacgacggtcaacctcgagtgagagaaaccgtcgtcgatcgcccccacctcgctcccgttctcactccctctacttccggcgacggcggaattcagggtctggattggtat

SEQ ID NO: 9195 - DNA, 125 bp, Glycine max
  Clone ID: 701102192H1
tttctttctttctcccctgtcgatccgagttagcattccaaggagcgagtaagtgactcggtggtacaggcggcgttttctcgtttcgccgcgcatcattcgatttcgctccgttccacacaaca

SEQ ID NO: 9196 - DNA, 261 bp, Glycine max
  Clone ID: 701102193H1
gactcgagcgaatcggctgacggctcgaggaagaaattcgcattcttcagtcttcgatttcaagatgattaggtctactgttgagaagattgaaaagggtctctcactaattgtgcccaaaaagcctgaactcagctacttcaatgaaaatcaagtggaaaccacaacaaatgttgtgccagatgatgttagtaagggatattttgcagttgttgcaatcaaagatggagaaatcaaaaggtttgttgttgagttagacta

SEQ ID NO: 9197 - DNA, 261 bp, Glycine max
  Clone ID: 701102194H1
gcactctccttccaagcaatactttctcttttagctaagtctagttcattgatcctcgttgccgagttactttaaaagaagtggaagaatattgtttcttggagtataaaacccgaacaatatatgcatatattagtggcgtgcttgtagttacgaacggaattgttatttatctgttctttctattcgttcctacagtgcgtttgctcaacacttttgttctcagcacctatctctttaagagtttacacttgaataaac

SEQ ID NO: 9198 - DNA, 266 bp, Glycine max
  Clone ID: 701102195H1
gcagaaggagcaaaagcaatggcgccgaagaagccgagaaccacgacaaggaaccctgatttggttagggggattggcaagtattcgaggtcgcagatgtaccacaagacgggcatctgggccatcaaggccaaaaaccgtggcgttttgccccgccacgatcccaagcccaagcccgaggccccggcccagaagccgcccaagttctaccccgcggacgatgttaagaagcccctcgtcaacaagcacaagcccaaacccgcgaa

SEQ ID NO: 9199 - DNA, 151 bp, Glycine max
  Clone ID: 701102201H1
ctctctactactgctagctgtgacttgttttgagttcaatcaaatcgcattggtatctgaaatcaggaaagatggttagcgtagctgagatcaggcaggcacaaagggcagaaggcccagcaaccatccttgccattgaattgaaaaccca

SEQ ID NO: 9200 - DNA, 260 bp, Glycine max
  Clone ID: 701102203H1
ggagagcgcaccatggccttcaatttcagctgctgcaaaagatttgatcaggaaaatgttgaataatgaccctaagaaacgcattacagctgccgaagcccttgaacacccgtggatgaaggaaggtggtgaagctctgacaagcctttagacaatgctgttttgactagaatgaaacagttcagagcaatgaacaagatgaagacacttgctttaaaggttatagcagaaaacctttcagaggaagaaataaagggttt

SEQ ID NO: 9201 - DNA, 241 bp, Glycine max
  Clone ID: 701102204H1
cctcgagccgctcgagccgctcgagcggtgagttgaatctcaaacttctaagagagatttcgctgctctctgaagaagggtgtttgcttgactttggagatgtcgctgctctcagatctcatcaaccttaacctctcagacactactgagaaggtgatcgcagagtacatatggatcggtggttcaggaatggacctgaggagcaaagcaaggactctcccaggaccagttagcgaccttc

SEQ ID NO: 9202 - DNA, 263 bp, Glycine max
  Clone ID: 701102205H1
cgaagtcctaaatttcctggagttccctatactttcttctcacagaggcaaggatgtaaggtatctctgtaccaagatgctcatgtgcctgataattttgtacctaaaatacctcttgctggaggcaagaattagaggctcataggtgttgggaggatatatttgatgcaatcactgatgctaaacacttcatatacattactggttggtctgtttatactgaaatctccttggtaagggcttctaggaggcctaagcctggg

SEQ ID NO: 9203 - DNA, 268 bp, Glycine max
  Clone ID: 701102206H1
gatggctaatccctcactcttgttcttcagtctcctcctattatccgccaccgtagccgccgccgaacggatcgacgatgaagacgaccttctgatccgtcaagtggtgccggatgcggaggaccaccacctgctcaacgcggagcaccacttctccgccttcaagacaaagttcggcaagacctacgccacgcaggaggagcacgaccaccgcttccgtatcttcaagaacaacttgctccgcgccaagtcacaccagaaattggat

SEQ ID NO: 9204 - DNA, 265 bp, Glycine max
  Clone ID: 701102207H1
atcaaaacaaccttctttctttcaggttcttgatcagtgtcaaaaccaaaagggtggttgcaaattgcaatggctaagcatgatgttgagggtggttccttcgctgcaaaggactaccatgatcctcctccagaccattgattgatgctgaggaactcacacagtggtccttctacagggctttgattgctgagttcattgccacaatgctcttcctttacatcacagtgctcactgtgattggttacaagagccagagtgatgt

SEQ ID NO: 9205 - DNA, 249 bp, Glycine max
  Clone ID: 701102208H1
gaggattttgacaatgccttgttggattttctggtgaatgaattcaaaagaactgagagtattgaccttgcaaaggacaggcttgcactgcagaagcttcgtgaagctgctgagaaagctaagatcgagctgcttcaacatctcaaactgagatcaacctgcctttcatcactgctgatgcatctggtgcaaagcatctgaacataacattgacaagatcgaagtttgaggctttggtgaatcacttga

SEQ ID NO: 9206 - DNA, 265 bp, Glycine max
  Clone ID: 701102209H1
aaaaccggtgcgaatgcctccatttagaactcctcaggctaacagctcaggctcaggctctaaatatccgagaccaagggatgtagggtccaattcaccctttgatttgccattgaaggatgatgacagcctcacaagctgcccaccattttcagtgccaaactacatggctccaaccctttcagcccgggccaaagcacgtgctagtagtaatcctagagaaaggcttggtggaactccaactagtactgattcaaagaggagg

SEQ ID NO: 9207 - DNA, 261 bp, Glycine max
  Clone ID: 701102210H1
taaagacttgcttccaagatggttctgctagagaagctctgggatgacgttgttgctggccctcaacctgagcgtggccttggcaagctcagaaaactcaccaccctcaaaactattgatgaaggagacatagcaagctgcagaagacgttgtcgatgccgtcgacaccgacaaccccgatgactcccacgactccaacgacaccgggatccgcgcgtaaagctgacaacgtttggaggagcgtcttccatcctgggagca

SEQ ID NO: 9208 - DNA, 259 bp, Glycine max
  Clone ID: 701102211H1
cttctctctaatttcatttccttgattatagctttcaattaatgcgcttctacgctgaagatcctctctcaggcttgacaataggccaggccatatatgaggtagctctcatgattgcagttctgagatggtcttgtgcttgatcttcagagtgatcaacgacagaagaacaacacaatccgacgagaccccaacaccagaaccatgttctcagatgacaagggacaaggacagcattcttttgctgacgactttcgga

SEQ ID NO: 9209 - DNA, 258 bp, Glycine max
  Clone ID: 701102212H1
tcaaagttggtatgtcatgtgaaggatgtgttggagcagtgaagagagttctaggaaaattggatggtgtggaatcatatgacattgatttgaaggaacaaaaggtggtagtgaaaggaaatgtccagcagacacagttctgcagaccgtttccaaaactgggaagaagactaccttctgggaaggtgaagcagcaacatctgaaactagcacagcaactgcctaaaacatttgcctctattctgtgcagaagaagta

SEQ ID NO: 9210 - DNA, 175 bp, Glycine max
  Clone ID: 701102213H1
ctcgagccgaacaaacaccaccacccattgatcggtttttgcttcatccaaactcaatgggcgccgacgaagactacgattacttgttcaagctggtcctcatcggagattcgggtgttggcaagtccacctcttgtcccgattcacccgaaacgagttcagcttggagaccaaa

SEQ ID NO: 9211 - DNA, 233 bp, Glycine max
  Clone ID: 701102214H1
atcttattgtgttcaagtgacagacaaatcagaacagggaagagagatttgaaatgtaaatgccaagtgaaagtgaaaagtacagtccagttttagtgatctctttaatttatttgttcatagattaattgatggtgtatgattgctctttctatttattgtggcatttttgtgttgtaccctgttgttgtgtttgcaataagtattagtaataaagcagcaaattcaatttc

SEQ ID NO: 9212 - DNA, 261 bp, Glycine max
  Clone ID: 701102216H1
cctctctcaaattccccattctaaaaccgtcgcctcgtgtacgagtttccactcacaacccccaacaaagagaacaacaacaaccctatactctctcgacctcgtattctcctccgtgtctccctcctcatttttttcttttccgttcacgaaatcgatggattttctggtgggtcccactttcaccatcgacgtcgcctcctccccgcctccgtacgacgccgacctccccggtgtcgccaccgccgccgaccgaccgta

SEQ ID NO: 9213 - DNA, 283 bp, Glycine max
  Clone ID: 701102217H1
gcattcggctcgaggcagcactgtccccagaagatctcacagatgctgagtggtattacttggtttgcatgtccttcatattcaacattggccaagggttaccaggcagaactctagcaaagggtcaacccatttagctgaacaatgcccatcttctgattgtaaaatttttagccgttctcttctggcaaagagtgcatccattgagacggttgtgtgctttccgtttagggaaggggttattgagttaggtactactgaacaggtcccaaagatttgagtg

SEQ ID NO: 9214 - DNA, 206 bp, Glycine max
  Clone ID: 701102218H1
ggaaagccggcacatgcagatttcgggcacttctatggatccagttatgtttcagcacctgatgcatcgtgcacgccatctctatcccgcaatagggacggcttgttagtaacagacatggatcttaacctgtgcaggcaggtgaaagacaagtggggtttcagaatgacttcacggtacgagttatatgccgacacactcggccg

SEQ ID NO: 9215 - DNA, 267 bp, Glycine max
  Clone ID: 701102219H1
ggccacttttctgtttctctacatcaccgtcttaaccgttatgggagtcgccggggctaagtctaagtgtagtaccgttgggattcaaggaatcgcttgggccttcggtggcatgatcttcgccctcgtttactcaccgctggcatctcagggggacacataaacccggcggtgacatttgggctgtttttggcgaggaagttgtcgttgcccagggcgattttctacatcgtgatgcaatgcttgggtgctatttgtggcgctggc

SEQ ID NO: 9216 - DNA, 264 bp, Glycine max
  Clone ID: 701102220H1
ctcgagccgcgcgtcgctccgcaccagtttcaccgcacgaatatcttgttgtttggagcgacccgagaaaaactctgtaaacatgttggtttaccaggacctccttacaggtgatgagcttctctctgactcctccgttacaaggaaattgagaatggaatgctgtgggaagttgaggggaagtgggttgttaaaggagcagttgatgtagacattggtgcaaacccttctgctgagggtggaggagaagatgagggagttgat

SEQ ID NO: 9217 - DNA, 268 bp, Glycine max
  Clone ID: 701102221H1
gaatctattgaatcaacaatcatgtcggacgaagagcaccatttcgagtccaaggccgacgccggagcctccaaaacctaccctcagcaagccggtaccatccgcacgaacggctacatcgtcatcaaaggccgccctgcaaggttgtggaagtttcgacttccaaaactggaaagcacggtcacgctaagtgtcactctgttggaattgatattttcactgccaagaaacttgaggatattgtgccctcttctcacaactgtgatgt

SEQ ID NO: 9218 - DNA, 264 bp, Glycine max
  Clone ID: 701102222H1
ctctcaccatggacgcgcaaccatcaaccccctcgactgccccgccgcctctgccgcaacacctcagctaccccgactccgtggcatcctcgcctcgctcccgcaacaccgactcctcgggacgagcccttcgcgcggcgctccaccaagctccgtctcatgtgcagctacggcgggcacatcgtcccccgcccccacgacaagtccctctgctacgtgggtggcgacacgcgcatcatcgtgtgcgaacgcgccacctcactc

SEQ ID NO: 9219 - DNA, 263 bp, Glycine max
  Clone ID: 701102223H1
gtggtgccttatcgctgtggttatcatcttcttcttcctctttcttagatctcttctttctctacgccgcacgccgaaaccatggccggaaaaggagaggtccctgctatcggaatcgatctcggaaccaccactcttgcgtcggtgtgtggcaacatgaccgcgttgaaatcatcgccactgaccaagggaacagaaccacgccgtcttacgtcggattcactgacaccgagcgtctcatcggtgatgcggccaagaatcaa

SEQ ID NO: 9220 - DNA, 254 bp, Glycine max
  Clone ID: 701102224H1
ttttgttctcattctgtgactctgtgcttagttaacgttaacactgacttaagatggcggattctgcagatgtcccccacgatgttgtgtccctcctctcttctcctcaaagggactttcttcttcgaaacacggcgatcacgttaaaattgacagcttgaagggtaagaaacttggtttgtatttttcggcatcctggtgtggtccatgtcaaacatttacgccaactttggtggatgtgtacaatgaggttg

SEQ ID NO: 9221 - DNA, 259 bp, Glycine max
  Clone ID: 701102225H1
cctcagccgaatcggctcgagggcagatcttgtggcgggtgaaaacgctgttttacctccacagtttgtgaaacaaaccgacaatagaggcctattgtctagttggtcgctcccaggagcaagtgttggctacccttcagttcggggatttttgacacacagtggttggaattcaacgttggaaagtatgtgtggaggtgttccaatgatttggtggcctttctttgcagagcaacagaccaattgtcggttttgttgc

SEQ ID NO: 9222 - DNA, 260 bp, Glycine max
  Clone ID: 701102226H1
atactactaactgtgttgtaatacctcagtggagaacaagatgaatccatggaacatgagaacttccaagttactctctcaacaacttgcttatcctccttatcgcttggtagaagagattccaaacatggaaattccagttgtgtgagcaaggagccaagaggttcacagatgacaatcttttatggtggccaagttcttgtcttggatgatattcaagctgacaaagccaaggacatcatgtcttttgccggcaaagg

SEQ ID NO: 9223 - DNA, 258 bp, Glycine max
  Clone ID: 701102227H1
ggccaacaaggattggtcctttggtttcaactacactgattggtggtctagattcggaaatcatcctcagaacaaaacacagcaacaacccaagcaaattgtcgtgggtggttctgagcattggcactaggattcaactacaccgattgggcattcaagagtgccccattttacctcaatgatactctagttttcaaatatgatgctccaaatgccaccagtttcccacacagtgtgtacatgttcacagttttggga

SEQ ID NO: 9224 - DNA, 260 bp, Glycine max
  Clone ID: 701102228H1
ctcctccaccgtggctccggcaacactctacaaagctctgacaaacagatgctgacactatcatcccaaagattattggggccatccaaactattgaaatcgttgaaggaaatggaggacccggaaccgtcaagaagataacagctagtgaaggtgaccaaaccagtttcgtgctgcaaaaagtggccgcaattgacgaggctaacttggtatacgactacagcatagtgggagggacggggttgcatgaaagtttggag

SEQ ID NO: 9225 - DNA, 258 bp, Glycine max
  Clone ID: 701102229H1
cagtcaaacactctgtaactctttattttattttctttctttctttctccgatcgcatagctcgctcgcaaccaccatgccttcccgaagaagaactctcttgaaggtcatcattctcggtgacagtgggtggggaagacatctttgatgaaccaatatgtgaataagaagtttagtaatcagtacaaggcaaccattggagcggattttttaaccaaagaagtgcaattcgaagataggcttttcaccttacagatt

SEQ ID NO: 9226 - DNA, 259 bp, Glycine max
  Clone ID: 701102230H1
aatctccatctaatagtgttaatttgtctttctctatctctatcggtcatgggtgcttttgcttttgatgaggaaaactcctccaccgtggctccggcaacactctacaaagctctgacaaaagatgctgacactatcatcccaaagattattggggccatccaaactattgaaatcgttgaacgaaatggaggacccggaaccgtcaagaagataacagctagtgaaggtgaccaaaccagtttcgtgctgcaaaaag

SEQ ID NO: 9227 - DNA, 261 bp, Glycine max
  Clone ID: 701102231H1
caacaattgcatgtgtcataagtgtagatctctaactaacattttatgtctagtcgagtcttgcttttgattaactcctgcatagatgtttctacccaaaaatgaaaaaaaaaagaagcttttataggttttggtttctcagtccaggtcacttttgtttctggtcgtttttttaatttctcaatttcaaaaaaatactctttttagtcccttctgactgattttcagcagtttggattcataattatagcagatgcactg

SEQ ID NO: 9228 - DNA, 264 bp, Glycine max
  Clone ID: 701102232H1
gatggatgccactacccccaagtactctaaggctaggtatgatgaaatcgtgaaggaagtctcttcttacttgaagaaggttggttacaacccagacaagattccctttgttcccatctctggttttgaggggacaacatgattgagaggtccaccaaccttgactggtacaagggaccaactctccttgaggctcttgaccaaatcaatgagcccaagaggccctccgacaagcctctaaggcttccattgcaggatgtctac

SEQ ID NO: 9229 - DNA, 260 bp, Glycine max
  Clone ID: 701102235H1
ctcgagccgcatatctactccatttcaccctgcctatatcaccgcagaaagaattaagaaagccaaaaatttggagctgcttttgactgctggcattggttctgatcacgttgatctcaaggcagcagctgctctggtttaactgtggcagagatcacaggaagcaacgtagtctcggtcgcggaggatgaactcctcagaatccttgttctggtgaggaatttcttgccagggtaccatcaggctgttaatggggaatg

SEQ ID NO: 9230 - DNA, 239 bp, Glycine max
  Clone ID: 701102236H1
agattttataacatgaaattgattctttctagattgtcctaattttaattgtacattccggagaagaggcagagcataaacgcatgcattcatacaaagaagaaataaaaaataaaaacacaaaggaatgcgttttgtttcaaaaaaaaaaaaaaaaaaaaaaaaaaaaaaaaaaaaaaaacaaaaaaaaaaaaaaaaaaaaaaaaaaaaaaaaaaaaagaaaaaaaaaaagggggggc

SEQ ID NO: 9231 - DNA, 265 bp, Glycine max
  Clone ID: 701102237H1
cgttgttgttttcagataaacacgtgactcactatctatctatcaatcgatatctccgagttcagccgaaccaaactccgaagctatggcagagctccaaaccaaggttgaacctgttacggtcccggctccgtggatcccgagccaccgctagctgaggctccgccgctcgagaagaaagcggtggcggtgccaccacctgttccggctgcggcagaggaaaccaaagctcttgttattgtggagaaggagaaggagaatgaga

SEQ ID NO: 9232 - DNA, 265 bp, Glycine max
  Clone ID: 701102238H1
cctcgagccgattcggctcgaggtttctatggcttctgaagtaatacagtaccgatgctttgccggtgggcttgcttgggccaccgacagcgatgctctcgagaaagccttctctcattatggtgagatcgtcgaatcgaaggttatcatcgatcgtgaaactggaagatcgagagggtttggatttgtgaccttcgcctcggaccaggcgatgaaagacgcaatcgaaggaatgaacggtcagaacctcgacggtcgtagtatc

SEQ ID NO: 9233 - DNA, 257 bp, Glycine max
  Clone ID: 701102241H1
gttcctccttttttttatggtgctaagaaaacccaatcaacagatcaagttcctatcttttatggtgctaagaaaactcaatcaacagatcaagttcctatcttttatggtgctaagaaaatccaatcacagatcatactcctcttttgtaatatggtgctaagaaaaccgaatccgtagatcgagttcctattcagtggtacggtattaagataactcaatccgaagatcaacctcctctgtggtacggtgttaag

SEQ ID NO: 9234 - DNA, 258 bp, Glycine max
  Clone ID: 701102242H1
gtgatttggagtttggagcgactgaactaatcattaatttgcactcgctgtttcagcttcatcacccttcttttgcatcatttatatctcttgagaaatggcacaagaaacctttctattcacatctaatctgtaaacgagggtcaccccgacaagctgtgcgatcagatctctgatgcagtacttgatgcgtgccttgaacaggaccctgacagcaaggttgcctgtcagacatgcaccaagaccaacatggtcatg

SEQ ID NO: 9235 - DNA, 257 bp, Glycine max
  Clone ID: 701102243H1
ctcgagccgctttgagaagtccaatgtggtatctccatttgcaatgcatcaacagcagctggccatgctggcacagcaacagtctcttctaatggctgccgctaaatctgctggtggggatcccaagacctggccagcttacaacaacaacagtctcttctaatggctgctgctgctgctaaatctggtggcacggattccaagtacctggccagcatacaagaacctgggtccaacattcctctccaaagttggct

SEQ ID NO: 9236 - DNA, 255 bp, Glycine max
  Clone ID: 701102244H1
caaaatgtaagagagagaaaagacaagaagaaggacagccccaacccgataatcatactcgtacttgagatgatattggataatctcaacctcaattttcctcaatacacaatcaccttcacttttttctctcctcttcatttctgaactcatccccatggatccctttgatttgatacgcgaagggtttggttgaggctgactagacatgtgctggtactacttttaaagtctgtttatgctgtagtagttatt

SEQ ID NO: 9237 - DNA, 257 bp, Glycine max
  Clone ID: 701102245H1
cgaaaccaccgaacttgttcacgagaacaggaatggcacctatcagtggattgtcaaacccaaatctgtcaaatacgaatttaaaaccaacatccatgttcctaaattaggggtaatgcttgtgcggtggggtggaaacaacggctcaaccctcaccggtggtgttattgctaaccgagagggcatttcatgggctacaaaggacaagattcaacaagccaattactttggctccctcacccaagcctcagctatcc

SEQ ID NO: 9238 - DNA, 258 bp, Glycine max
  Clone ID: 701102247H1
ggcactccaaattatgttgctcctgaggtccttaacgatagaggctatgatggggcaactgcagacttgtggtcatgtggggttattctctttgtattggttgcaggttacttgcctttcgacgacccaatcttatgaacctgtataaaaagatctcagctgctgaatttacttgccccccatggctttctttcactgccaggaaattgattacacgaatcttggatccagatcccaccactcgtatcactatacctg

SEQ ID NO: 9239 - DNA, 241 bp, Glycine max
  Clone ID: 701102248H1
aaacaaattactctcttcttctgcactttacttttccccttcactcctcttccgttttctctcactaacctcatttctccgtctgcaaaccctaaagcccattcattttgttcgccggcgactaatttacggcccggtccggctcgaaatattcgacccgaaccgcgcgtggttacctgttctctctggagagagcgagaccagggcgtggtggtggaaatgtagaaccaccagcttcaag

SEQ ID NO: 9240 - DNA, 228 bp, Glycine max
  Clone ID: 701102250H1
gggaatgtccctaaaagcagaatttttttcattgcgtggtcccctgacacatcaagggtgaggagcaagatgatttatgcaagctccaaagacagattcaagagggagctggatggaattcaagtagagttgcagcaactgatcctactgagatgggtcttgatgtgttcaaaagccgtgccaactagaatgattatataaactagtaggctttctggtggggagcag

SEQ ID NO: 9241 - DNA, 264 bp, Glycine max
  Clone ID: 701102251H1
gttacagatgccgacaacgtcatcccaaaggctgtcgaagccttcaggagtgttgaaaaccttgaggggaacggtggccctggaaccatcaagaagatcactttcgttgaggatggagaaagcaagtttgtgtgcacaaaatagaatcagttgatgaggcaaacttgggatacagctataccgtagttggtggagttgggttgccagacacagtggagaagatcacattcgaatgcaaattggctgctggcgccaacggagggt

SEQ ID NO: 9242 - DNA, 265 bp, Glycine max
  Clone ID: 701102252H1
cattattttcattcctactaacactccatctatcactatcaggggtaatttcaaccactttcactctagttaacaaatgtgagtacacggtgtggccgggaattctttccaatgctggtgttcctcctctttcaccacaggcttcgttctccaaaccggcgcgtccactacaatcgccgcacccgcgtcttggggtggccgtttctggggcagaacattatgctcccaggactcaaccagcggcaagttctcctgcgtcaccggc

SEQ ID NO: 9243 - DNA, 97 bp, Glycine max
  Clone ID: 701102253H1
caaaaactcaacgcaaagagagaaagcacgacagaacacaagaccccgttagacttggtgtatattgtgtgtctgtctgtgttgttccacagaacat

SEQ ID NO: 9244 - DNA, 263 bp, Glycine max
  Clone ID: 701102254H1
tgaagatggagttgatgttatacgcgaatacggtgttgaaggatacccgtttacatcagcaaggatccaagagttgagagatcaagaagaggaagctaggaggaaccagtccgtgagatctctcttggtctctccatctcgggacttcgtaatatcatctgatggaaagaaaacacttgtctctgagcttgagggcaagacagttggtctgtatttctgcgtgaagtcattcggatcatgcagtgactttaccccaaagcttg

SEQ ID NO: 9245 - DNA, 159 bp, Glycine max
  Clone ID: 701102255H1
cgtcattttgaagcagccaataagttagaaggaagtggatgagaaagaaaaacaaactaattggctgcttcaaaatgacttattcatgtctagtttatgtttcagtgatggttttgttactagaattctgagagtaaaaaatacatattttgaatattt

SEQ ID NO: 9246 - DNA, 258 bp, Glycine max
  Clone ID: 701102257H1
ctccatttcgccattctctccgcgcaccgttttccggcgcagtccccggcgagtcaccgtcgtttccgccggcaagtctctctcaccgttgccatcctccttcagatagtatatatttctcatataatgttccgttattagagaagttgagaaaatggacggccatatgggactgaggaaaatcagctctcactgctctatccctgatttggatgattctgctatcttacgtttgcttgacaagccaaagttgaacat

SEQ ID NO: 9247 - DNA, 257 bp, Glycine max
  Clone ID: 701102258H1
gtttttggaatcagctactacatatcatcgccaggtccaagcttctgtccaagagacactgaaaaagcatgagcttactagacctcttgctactaaagagttggaatggtttgcggcctctgccctttggctttacctattgttttaatggctagagtgttttcagctgttttctgtagcaaaaaagtgagtaaacctgctcgaaatggaaacactcaccatgcacgacgtaaacctaagcgagggcatctagacaa

SEQ ID NO: 9248 - DNA, 254 bp, Glycine max
  Clone ID: 701102259H1
cagaaaagcgtgtcgaatggatttcacggagaaggatctattcggcgaagattccgacaacgacaacggcccccactcctccggttcctcttcttcttcctccgccgcttcctcttcctcatcatccccgcctcctcttccgcctcttcctccaaagccagcgacgccgccgccgactcctcctccgccagcggcgcgcaagcagcggcgccgaaaacgacgacgaagacaaagatctgtttggctccgataat

SEQ ID NO: 9249 - DNA, 178 bp, Glycine max
  Clone ID: 701102260H1
ccggttcagcggcatgccataccgatatcccttgcggggcgggatttgatggcttgtgcgcagactggttctggaaagactgccgcattctgtttcccaatcatcagtgggattatgagaggccaacccaagtcctccagaggccgcctcctcgcggtgtccgcacagtctacccact

SEQ ID NO: 9250 - DNA, 255 bp, Glycine max
  Clone ID: 701102262H1
caaattgtgaaggagaatttcgacttcagacctggaatgatcaccattaacttggaccttaagaggggtggtcataggttcctcaagacagctgcttatggacactttggaagggatgatgcagactcacctgggaagttgtgaagccactcaagtcagagaagcctcaagcttaagagtgttgttaagttaatcactcccttcagtggatgtcttgctgggtgtggatgaataatttgcgtgtttcatgactac

SEQ ID NO: 9251 - DNA, 279 bp, Glycine max
  Clone ID: 701102264H1
cctcggtcttcggctcgatgttgacgacggcaacgttcaaggagatcaagaaaacctctgaacactcacaataccatcccgttaataaaaacaagtctctctctttctctcttcttcgttgcccgacggttgatgtttgatatagaagtcacctaaacacatggggacaagcagttttctatggaactgtactaaaaagtttatctcagccgggattgtcactgtgactgtgactgatctttttgtgacagttattccagttcgaggtggatctatgtc

SEQ ID NO: 9252 - DNA, 256 bp, Glycine max
  Clone ID: 701102265H1
agaatcgtaagctatgggaaagtcttacccaactgtgagtgctgattaccagaaggccgttgagaaggcgaagaagaagctcagaggcttcatcgctgagaagagatgcgctcctctaatgctccgtttggctggcactctgctggaacctttgacaagggcacgaagaccggtggacccttcggaaccatcaagcaccctgccgaactggctcacagcgctaacaacggtcttgacatcgctgttaggcttttgg

SEQ ID NO: 9253 - DNA, 264 bp, Glycine max
  Clone ID: 701102267H1
cccaattccaaattcaagaaattttttaaacttgacatatctgctatcaccttttccgcttcttgcgattcgacgatggccgatcaaaagctttcagaaccggcgcttaaacgtgagcagcttgatgaatcgtgagtagtctatattttgaacaacgaattcttgaactccgacttcttcaagacctcgagaacaatgatgaatgtaggaaaaatgggagcctgacaaggttaaatgaccagagtgatgtctgtggatttagaa

SEQ ID NO: 9254 - DNA, 264 bp, Glycine max
  Clone ID: 701102269H1
gaaaaagaaatgagattgaagattattgaagaagctgaggagtataaggtggctttctatgagaagaggaagcttaatgttgagactaacaaggttcagattagagaaagggagaagttattcgtggccatcaagagaagtttcacaaagaggcagacaaagcttattggaaaaccattgcagagctcattcctcgtgaggttcccaacattgaaaagaaaagaggcaaaaaggatcaggacaagaagccatcaattacggtca

SEQ ID NO: 9255 - DNA, 263 bp, Glycine max
  Clone ID: 701102270H1
gctcgagccgctcgagcggctcgagcaaatcctttgtggcaattgcatgactgggataagcattgcatggtggaagtggactcacaatgctcaccacatctcatgcaatagtcttgactatgatcctgattccagcacatacctgtctttgccgtgtcgacacggttcttcaattcaatcaaatcttgtttctatggaaggaaattggtgttcgattcattatcaaggtttctcatcagctaccagcacttcacattctaccc

SEQ ID NO: 9256 - DNA, 94 bp, Glycine max
  Clone ID: 701102271H1
ctcaacgcaaagagagaaaccacgacacaacacaaaacctccttagacttggtgtattttgtttttctgtctgtgttgttccttcacaaccaca

SEQ ID NO: 9257 - DNA, 261 bp, Glycine max
  Clone ID: 701102272H1
tgggatcaagaaagcgttggttttttacgctggaaaagcgcccaagggatagaaaactaactggatcatgcacgagtatcgtcttgcagacgtggatcgttccgttcgcaaaaagaacagcttaaggcggatgactgggtgctgtgccgaatttacaacaagaacaggtgcaattgaacagcaacaactaccaccaccgagtggggtccgcaaaattgaatgttccgaaatggaggacgagaagccggagattctgccgcc

SEQ ID NO: 9258 - DNA, 259 bp, Glycine max
  Clone ID: 701102273H1
caacaacacactagacaattttccaattcaattatcgattcccctactcacaaaaattaacatgcaatccatttctttgttcaattcctcaccaatattattccatccattttcaccatctaggccatgttctaatggcaagaaaatgaattcgtttgctccaactaaggcttccatgagaggatcagcggatcagaacttcagtggaaggttggtggatgagagcatgataatactgaggaagaggatccatgagatg

SEQ ID NO: 9259 - DNA, 254 bp, Glycine max
  Clone ID: 701102274H1
cgattgttctcctctttaatacatactgttctctcttcgatttgagggaacagtacaagagtctgagcatcggttaacccaactgcacaggtagtctccaaataatggagcctcatgatgagactgatgccaggctcctgaacgccccattctttgcattaataattgtggcttctttggaagagcagctaccatgaacatgtgttccaagtgttacaaggacatgctgttgaagcaggagcaggacaaatttg

SEQ ID NO: 9260 - DNA, 254 bp, Glycine max
  Clone ID: 701102275H1
aaggagtccttggccgtgggctgcgaactgttggtcttcggtcgagaattgatggagtttgccatttggaagtatagcatgatttgtcgtggttgggtgaagtgccaggagatgaaccaaccccgttgtttgtttggatctagtagtcttggttcgattgctattgttgctgggggaagtgataagtatggaaatgttctaaaatcagctgagttgtatgactcttcaacaggtatgtgggaacttttaccaaa

SEQ ID NO: 9261 - DNA, 255 bp, Glycine max
  Clone ID: 701102276H1
tctaacctcatcactcctcacacaacacacttgcctcttctacctccctccacttctagttcttcccacatggaggatttaatcatatctccttcttcgtcttcctctttggtctctctaccccagaaaacccaacaccaacaccaacccttctacaaaaactccaattcctcctccaaagccaacccgattggtgggtctacgccattttctggcaagcctcacacgacgacaatggcaacctctacttatcct

SEQ ID NO: 9262 - DNA, 247 bp, Glycine max
  Clone ID: 701102277H1
tcgagctcatcttcttctgaattctattgttgcagggtaacacatggctctgttattcaaggatccgtcgaagatttcggcgtatcgagatagaaggttccccgggacgcaagaggagttgagcacgcgcttctgacctcaaccaccgtttacgtggggaacatgtcgttttacacgacggaggagcaagtttacgagctcttctcgcgtgctggggaaatcaaaaagatcatcatgggcttggaca

SEQ ID NO: 9263 - DNA, 254 bp, Glycine max
  Clone ID: 701102278H1
gaatattgcttagttttgtcttatctgaatttggaaacagcttttgaatggctttttcaagagttgcactgctaatatgcacggtcgggtattttgtgattgcctctgccggcaatttccaccaaattttgatatcacatggggagatggtcgggctaagatactcaacaatggagagcttctcactctgtcacttgacaaagcctctggctcgggtttccaatccaagaacgaatacctttttggcaaaattg

SEQ ID NO: 9264 - DNA, 258 bp, Glycine max
  Clone ID: 701102279H1
ctcacatcctcttcttcatccctttgcatctccaattccgcttctctcagtttctccagaaacctctcacgccctttcttctcaaaaggtaactccttgtcgctaagcacagtactgaggcgcgcgctgtggtttgcgaggctgcgccgaagaagaaggtggattcggcggtaaagagagcgcgccaagccgagaagcaccgcgtttacaacaaagctcgcaaatcggagattaaaacacgtaccaagaaggttttgg

SEQ ID NO: 9265 - DNA, 258 bp, Glycine max
  Clone ID: 701102280H1
cggttgcagagatgagtggatgaattaattgatgtatgacattcaaatactaattgttgctatcacaattcacaagagattggattttggaatggaaagggtgttgtcagtagatgagatatcggagaatactgggtggctgcatcatcttcttcatcatcatcatcatcatcgttcaagtcaaagatgaaccggagcgaatccgaatgggcctttcagcagttcctacagcaggaagctgcttcttcttcatctaat

SEQ ID NO: 9266 - DNA, 250 bp, Glycine max
  Clone ID: 701102282H1
ggaagaggatgcggaaggagagaaggagaggcttttggagggtatggcggttttggattttgacatgctttgttcctctgtggcgttgcaaagttcgcatgggagttgggggaagcttgggggtggggatgtgatgaggagcaacaaggtggggttttgaggatgtgggagggtgaacttctcgattgctttgatgatcgccgaatcgcttttgaatcggcatgttgtcctcgttacggttttgggaaga

SEQ ID NO: 9267 - DNA, 263 bp, Glycine max
  Clone ID: 701102284H1
tgaacatagttgaaggaaccacaatattgaagcttccacaaggttccaatgacgtgcttctaaaaaatctctacctttcctgtgacccttacatgagaatgctcatgaccaaggtggaaggcctcgacggtttggcacctatacacctggctctccattaacagggtatggagtgtccaaagtcctagaatctggacacccagattacaagaaaggtgatttagtgtggggatctacaaaatgggaagaattcagcttggtgt

SEQ ID NO: 9268 - DNA, 261 bp, Glycine max
  Clone ID: 701102285H1
catcaccacataaaactaacttgggtagtgccttttttctttctctctatcgattctcgcaacaaaccctacccttttttagtcttcgaatttttcataatcgtaatgggttccgaaggatccagcgtttcgttcctaggaatttcagattattgcaagagcttgagagaggtgagaagggaattggggatggcaatgttagctatggaatggatgacgctgacgacatatacatgcaatcttggactgggactatcattg

SEQ ID NO: 9269 - DNA, 260 bp, Glycine max
  Clone ID: 701102286H1
cgacctcgtcatgcagaccaaacagctcggccgcctccccgtcgtccacttcgccgccggcggagtcgccacccccgccgacgccgcgctcatgatgcagctcggatgcgacggcgtcttcgtcggctcggcgtcttcaagagcggcgatcccgcgaagcgtgcgagggcaattgttcaggccgtgactcacaccagtgaccccgaggttttggcagaggttagttgtggattgggggaagccatggttggtatcaattt

SEQ ID NO: 9270 - DNA, 259 bp, Glycine max
  Clone ID: 701102287H1
tgggagtgctgctgattggagatatgctgcagagcagtttgtgaagaagcttccagataaagtgattgtacacctgaatgcaattcttcaaaattgacgtttgatggtgttgatacaatgggcgagagctagctgaagagaggtgcagaagatatcctttgtggcgcattctctaggaggcttggtggcaagatatgctattgggagactttatgattattcttcaacattggcacttgttggtaccagtagagactat

SEQ ID NO: 9271 - DNA, 254 bp, Glycine max
  Clone ID: 701102289H1
ccgcactccaccgctttacgccggttatcagggaaggagcagagggcgtagagcgccgtggcggcttcttttctttcccttcccttcccgtcgcggaggagtgtcacgagggcattgatggagcccggcacgctccgatggtggccttgttgacgtggaggacggcgaggctggtgagcagggtggcggcgagggcgcggcagtcggagggggcggcggaggagaggaggagagagattaaaggggagaggagg

SEQ ID NO: 9272 - DNA, 257 bp, Glycine max
  Clone ID: 701102290H1
ggaaccgccatcgccgcaacagcctccgcaaccgccatcgcgcactgccaccatcctcggaaagtaccagctgacgcgcttcctcggccgtggcagcttcgccaaggtctaccaggggcgatccctcgtcgacggtgccgccgtggccgtgaaaatcatcgacaaatcgaaaaccgttgacgccggcatggagccacgcataatccgcgagatcgacgccatgcgccgcctccaccaccaccctaacatcctcaaaa

SEQ ID NO: 9273 - DNA, 255 bp, Glycine max
  Clone ID: 701102291H1
ctctgcttcaatggggaagggaacagggagcttcgctaagaggagggacaagacccacactctctgtctgacgtgtggccgccgcagcttccaactccagaagactcgctgcgccgcttgtgcttcccccgctgcacgcacgcggaaatataactggagcgtcaaggcaattcgcagatagaccaccggaactggcaggatgagatacttgcgtaacgtgcctcgccgtttcaagagtggcttcagagaagcgta

SEQ ID NO: 9274 - DNA, 255 bp, Glycine max
  Clone ID: 701102293H1
ctgatgctcagatttgtgtttggaatactgatggatgggaaaagcagaagtctagattcttgcagcttcctcctgggagaacaccaccagcacagtcagatacccgtgtacaatttcatcaagatcaaatacagttcttggttgtacatgaaactcagctcgccatttatgaagcaactaaattagaaggactaaagcagtggttcccgcgagactcatctgcaccaatatcgtatgcaactttctcatgtgata

SEQ ID NO: 9275 - DNA, 255 bp, Glycine max
  Clone ID: 701102294H1
ggagtttggagcgactgaactaatcattaatttgcactcgctgtttcagcttcatcacccttcttttgcatcatttatatctcttgagaaatggcacaagaaacctttctattcacatctgaatctgtaaacgacggtcaccccgacaagctgttctatcagatctctgatgcagtacttgatgcgtgccttgaacaggaccctgacagctaggttgcctgtgagacttgcaccaagaccaacatggtcatggtc

SEQ ID NO: 9276 - DNA, 258 bp, Glycine max
  Clone ID: 701102295H1
ccctcgagccgattcggctcgagcggctcgagctcccttcttccttgtctctttctcttctcaacaacatgcagatcttcgtcacgactttgactggcaagaccatcaccctcgaggtcgagagtagcgcaccatcgacaacgtcaaggccaagatccaggacaaggaaggtatccctcctgaccagcagaggttgatttttgctggtaagcagctggaagatggtcgcactcttgctgattataacatacaaaagga

SEQ ID NO: 9277 - DNA, 258 bp, Glycine max
  Clone ID: 701102296H1
gcttggttgcagcttcagcagcagcggcaagcaactccatccgcaatgggaatcgatttgaaggcaggaggtaagtccaagaagaccaaacgtacagcccccaaatccaatgatatttacctcaagctctcgtcaagctgtaccgttttcttgttcggaggactggtagtaacttcaatgccgtcatcctcaaacgccttttcatgagcaaggtcaacaagcccccgctatccctctctagattgattcgttacacca

SEQ ID NO: 9278 - DNA, 277 bp, Glycine max
  Clone ID: 701102301H1
cgctcattatatccctctctttctatagatatctacactgatatcatggataagaatgccctctttaggtttcttcttgttcttctgactctttcctgcgttgtatttgttgctgctgttcctgcaatcagaagctccatgattgggaaaattgatcctttagtgcaagatcttctggctaaggaggatccagttatgcggttaaggaatagcgaggaagaaatgcaagaagggattgtagagagcagaatgttgatggatattgtggactaccccc

SEQ ID NO: 9279 - DNA, 275 bp, Glycine max
  Clone ID: 701102302H1
cctcgagcgaatcggctcgagggcatgttatgattcaaccagcattagaaattcctcacctggactagttgtgccaactattgatctagtgctgcgaggtggagtgcagtggactatttatggagccaattcaatggttatggcaaagaaaaacccagcacgtcttgcaattgttgatggagggacagagcctagaatgtcgttcgttaaagcttcaattgtcatcggtggatatcagttggaggacaatcctccggagtttgatgtggctcccc

SEQ ID NO: 9280 - DNA, 273 bp, Glycine max
  Clone ID: 701102303H1
ctgtgacatacggtttaattgtttatgccatgatcggatttgactggactgcagagaaattcttttggtatctatttttcagtttcttctcattgttgtactttactttctacggcatgatggctgtgggagtgacgccaaaccaccatgttgctgccattgtggctgctgcattttatgcaatttggaatctcttctcaggatttatcgtcgtaagacctaaaatgcccgtgtggtggagatggtactattgggcatgtcctgtggcttgga

SEQ ID NO: 9281 - DNA, 189 bp, Glycine max
  Clone ID: 701102304H1
caaacagagaccagccatggacggtgattcctcttggagtgctcgactctcttccgcttccaggcgctaccaatccgctcttcaatctcgatcagacatgttcatgggttttgatgcaaatgatggggacgatgatataagagaggagtttctctgcccatcatattcagagcattttgacaccgatgg

SEQ ID NO: 9282 - DNA, 238 bp, Glycine max
  Clone ID: 701102305H1
tttcgattccagggttcctctgggaatatagtccctggactatcatgggattactatttgttgacatgtcacaagcttggagaggattataaggaagcatcttgaggatgtcttcgagaaggacagtggagtagctcctggcatacttcgactcttcttccatgactgctttcctaatggatgcgatgcgtctatattgttgaactgagacggtgacgagaagcaacaccgtgctaac

SEQ ID NO: 9283 - DNA, 261 bp, Glycine max
  Clone ID: 701102306H1
tgccaaactaagaatgaagcacgagtagatcgtccaagaagggcaaacttcaaacaagagactcactacacagcgatcaaaacctctctctacttcaacggtgatggcttcgctgtctacgattgcaaaggccaactcgttttccgcttcgactcctacggtccccgcgcgcgtgacaaggacgagctcgttctcatggatccccatggccgttctcttctcactctccgccgaaagaaaccgagtcttcatcaacgctgg

SEQ ID NO: 9284 - DNA, 229 bp, Glycine max
  Clone ID: 701102307H1
atccaggcttgtttcttgacaggatatcttcaaccatctctaatgctttcaagcttctttctggagcaacatttcttggtgcaatcttatgcttgatcgatttccttctcaagagatagtctggtttcatagtcttcttcactataggtgaactacccctatggctcactcaggctcctacaaatcatgtttcactacgttgtgtaaaacatagtctatggccactgtc

SEQ ID NO: 9285 - DNA, 267 bp, Glycine max
  unsure at all n locations
  Clone ID: 701102309H1
cagcattcaccctnntgtggaactgtgaacagggtgacaatactgacagaccaatttggtcaaccaaaagggtttgcttatgtagagtttgttgagattgatgctgtgcagaatgctctcctgttaaatgaatcagaattacatggtcgacaactgaaggtgtctgccaagcgtacaaatgttcctggaatgaagcagtattttggaagaagacctgctggtttccgatctaggaggcctttcatgcctgctccattctttccacca

SEQ ID NO: 9286 - DNA, 110 bp, Glycine max
  Clone ID: 701102310H1
aatcgagccgattcggctcgagcactccatcctctctctcttctcatcttctgttctctaatttcctgctcttgtttcttagaatccgtacggtctaatccacacaacat

SEQ ID NO: 9287 - DNA, 267 bp, Glycine max
  Clone ID: 701102311H1
aacaagagagagctagcagtgcaagctttcaacatccaaaacaacagagagtttttggctttagaagctgaaggaatatagttatcacaatggggagagctccatgctgtgagaaaatggggttgaagagagggccatggactccagaagaagatcaaattctcatcaattacatcaacacttatggccatgctaattggcgtgcactgcccaaactagctgggctattaaggtgtggaaagagttgtagactccggtggataaatt

SEQ ID NO: 9288 - DNA, 262 bp, Glycine max
  Clone ID: 701102312H1
cgacaataaccatgggtatctccaacatcgcttctccttttgactacatcatcttcgatttggacgacaccttgtacccctccagcaccggaattgacaagtgcgtcaagaaaaacatccaactctttctcatccagaaatgcggactctcagaatccaaagccttgacccaacgagtcgagctcttcaaaacctacggaagcacccttgccggcttaagagcacaaggcctcgatatcactgcagaggactaccacggttt

SEQ ID NO: 9289 - DNA, 263 bp, Glycine max
  Clone ID: 701102313H1
gagaacctcttttcctttcgatttaccttcgattcatacaagctcacctctcaattttggtttatcattcctagaagaaggaaccatcaatcattgacatggccatggcatatgttgctaggtcatcagagtcatctcaagtgcttactttccattccactgctaaatggaatgctcaccttgatgccttgaaacaaactaacaaactgatggtggttgatttcactgcatcatggtgtggaccttgcaaactcatggatcca

SEQ ID NO: 9290 - DNA, 265 bp, Glycine max
  Clone ID: 701102314H1
cattaatcactttctttaaggaaactaattaacatgggaggaaggggtcacatggggtggttcctcttctgttgttgttcttcttctctcctttttttttgttgcttcttcttcttctgtgtcacccagaagaaacttgcccatcatagcctttgaggatggctacacacccttgtttggtgaccataatttggccatccatagagatggcaaatcagttcacctttcacttgatgaaagaacaggttctggatttgtgtctcat

SEQ ID NO: 9291 - DNA, 265 bp, Glycine max
  Clone ID: 701102315H1
actcgagccgctcgagccgattcggctcgagcaaaacatacaccacttctctctgtttctactcactctacctctccctccctcttcaactaacattccaattgaaaaccaagacaccgctgtcagagaaatcacgcccaagaacaggagcatcatgggtgctggagggcctgatgatgaggccaataggtggccaccgtggttgacgccactgctgaaagagagcttctttgttcaatgcacgttgcacgctgattctcacaag

SEQ ID NO: 9292 - DNA, 268 bp, Glycine max
  Clone ID: 701102316H1
gtaccttggagaagaaactttgtatagcaaaaatgataaaaaccaatagctcccaagattggcctgagccaataatccgtgttcagtccttatccgaaaggtgcacagattcaatccctgagaggtatatcaaacccctcagtgagcgtccatctgatgatgttgttgctgttgatgatgatgatgatgtcaacatcccaatcattgaccttgcagggctttatggtggtgaccctgaagctcgagcctccacacttaagcaaatctc

SEQ ID NO: 9293 - DNA, 272 bp, Glycine max
  Clone ID: 701102317H1
gtcgaaaaaaaggacttaacttcaatcgtagatggtttatatgcaggctattcgatgttggtgatgtctccacctcctagctccgttccgttaccggctttcatcactaagaagattgcggttgttagtgacgccacgagcgacttgcggaaaatgttacggcttgattttccctaatcctgtggcggtttgtgaatgaacgaggatttgaacggaggttgttggtgattagggcattgtagtgctcgatcttctcttattttttcagcggg

SEQ ID NO: 9294 - DNA, 265 bp, Glycine max
  Clone ID: 701102318H1
aaaaattcaaccatccaagtctatctatcttagtgccaattcacatgtctgcccatcacaacaaaagaaaaatagactaaaatgaaaaaaatactcattaaataataaaaaatactttctctctccggtctctctatctttttaatgaatggaaatggaacgaggaacttttttgttgttgttgtacatgatggtgagaaaactgagaaggttgggtaatttggccgtgagattcaatgttcgtctttctttttttttttttttt

SEQ ID NO: 9295 - DNA, 273 bp, Glycine max
  Clone ID: 701102319H1
gggttcgtacgggaagaagaaaggttcaccggaagacattctggaaaccctaggagacttcacgagcaaagagaactgggacaagttcttcacccttcgcggtgattccttcgagtggtacgccgaatggcccaacctcagggacccactcctctccctcctcaaaaccgttcctctcccgcttcagctcctcgtccccggctgcggcaactcccgcctctccgagcacctctacgacgccggccacaccgccatcaccaacatcgacttctc

SEQ ID NO: 9296 - DNA, 267 bp, Glycine max
  Clone ID: 701102320H1
caaaatttagaaacaaaaacatgttggtgaaggtgtacggtccaacctatggagcccccaagagggtgctggtgtgtctgattgagaaggaaattgagtttgaaacagtacatattgatctcttcaagggagagaataaggaacctgagttcctaaagctgcagccatttggatcacttcctgttattcaagatggtgattatactctctatgaatctcgtgcaataatcagatactttgcagagaagtataaagaccaagggacag

SEQ ID NO: 9297 - DNA, 270 bp, Glycine max
  Clone ID: 701102321H1
gttcacaagaagattccggttctcatccacaatggcaaacccatttgtgaatccctcattgctgttcagtacattgaggaggtttggaatgacagaaatcccttgttgccttctgacccttaccagagagctcaggctagattctgggctgattatgttgataagaagatatatgatcttggaaggaagatttggacatcaaaaggagaagaaaaagaagctgccaagaaggagttcatagaagcccttaaattgttggaggaacagctg

SEQ ID NO: 9298 - DNA, 269 bp, Glycine max
  Clone ID: 701102322H1
cagctatacttgttccttttgaaggttagaagtgctacaatacaaacaatggcagctactcaggaagatgtgaagcttttgggtattgtgggaagcccatttgtgtgcagggtccagattgcccttaagttgaagggagttgaatacaaatttttggaagaaaatttgggcaacaagagtgatttgcttctcaaatacaaccctgttcacaagaaggttccagtgtttgttcacaatgagaagcccatagcagagtctcttgtgattgt

SEQ ID NO: 9299 - DNA, 267 bp, Glycine max
  Clone ID: 701102323H1
ctcgagccgctcgagccgattcggctcgaggaaaagaccatcaaagtttcacttcagccttatccggactagggtttcggtttttgacccaacctttgacgtatctaaaccttaagtttcggatcaggtctgagcaatctggttggtagaacctttggtcttagagagtcaagttttatgtctgaattagacgatcaaattcctactgccttcgatccttttgctgatgcaaatgctgatgactcgggtgctgggtcaaaggagtat

SEQ ID NO: 9300 - DNA, 266 bp, Glycine max
  Clone ID: 701102324H1
caagtttgaagtttcagacggacaagccgtggatgacacagctcgctgctgttgcttgtttgtcccttgctgcgaaaacagaagagacccatgtgccactcctcttggaccttcaagtggaggagtcaaggtttgtgtttgaggcaaagactattcagagaatggagctgctggtgctgtcaactcttaagtggaggatgcttccggtgaccccaatttccttctttgaacacattgtgagaaggcttggtttgaaaagtcgcttg

SEQ ID NO: 9301 - DNA, 264 bp, Glycine max
  Clone ID: 701102325H1
cagaaaccctaatttcctcgttatttcgatactctctccctttggaaaaaatcaaaggtgctcgcagtcgcagcgattagttcaaagattgtaagcgatcgtgaatcgtcgacaaaggttcgtgtctgaattgaagtagtgtcatcaccatgagattgagaaagggaaataaggtggagatccgtgccaatgctgatggacttagtgtggaatggtgttgtgctcgtataatttctggtgatggacacacctacagtgtccagt

SEQ ID NO: 9302 - DNA, 265 bp, Glycine max
  Clone ID: 701102326H1
aaaagcttgatggtgatgctgctttgaataaattgttccgtgatatttaccaaaatgcagatgaggacatgaggagagcaatgagcaagtctttcttggagtcaaatggaacagtgctatcaactgattggaaagaagtgggatcaaagaaggtggaaggcagtcccccagaaggtatggagttgaaaaaatgggagtattgattcggtacttaaatattcatttgagctgatgcttgtgagagttcaagtttgtctcctcccaa

SEQ ID NO: 9303 - DNA, 263 bp, Glycine max
  Clone ID: 701102327H1
cgcgagataatgatcgcgatcttgatccctcctctcggagtttgctttcgccacggttgttgcagcgtcgaattcatcatctgcttgctcctcacaattctaggttatattcctggtataatctatgctctctatgctattatcttcgtcgatcgtgaccagtactttgatgaatacaggcgtcctctctatgcacaatactgatgataattttagtttgtatgcctatgagtgatgctcatgttgatcgtgtgcttaattac

SEQ ID NO: 9304 - DNA, 263 bp, Glycine max
  Clone ID: 701102328H1
agcatcatttccaaacaaaaccaaatcacatttcccgtttcattggtattgatggatccggagcagactttcatacgcgtgcaggagaggttttctcagatgctgacgcccaaagtcagagttgctttggagtatctctacctgttcatcgccataaccttattctgcattctcgttgttatgcacgccaattacgttcaacagcctgggtgttcaagtgagctatccggagtagtgacatcagaagcccaacttattcagat

SEQ ID NO: 9305 - DNA, 141 bp, Glycine max
  Clone ID: 701102329H1
cctcgagccgattcggctgacgaaagaaagaaacctaacagcgccatagcgttctctaagctatcgtgcgaggtccctcgacctccgcacaaccccagcaccaaggggctgtgcctgtcgtcgtcttccacgcccatgtcg

SEQ ID NO: 9306 - DNA, 152 bp, Glycine max
  Clone ID: 701102330H1
cctcgagccgattcggctcgagttcaccggaaagttttcaaagccaagcaaatacgagatttacccaattttcttgcacttgaattttccactgttcaatcttcaaaatcacatttttctcgatcttcaccttctgggttgctttttttttt

SEQ ID NO: 9307 - DNA, 264 bp, Glycine max
  Clone ID: 701102331H1
gaagaaccgtgtcaagggtttgttcccatccgcaagttacagataacagactcggaagttgatgattatgattctgatgggaagatggggaatggtttctactgtcaagagatgtatcctggtgaggatggacaactctcatggttcaatgctggtgttagagttggtgttggaatcggccttgggatgtgcgtagggcttgggattggtgttggactgctcatgcgatcgtaccaaacaacaactagaaacttcaggaggaga

SEQ ID NO: 9308 - DNA, 264 bp, Glycine max
  Clone ID: 701102332H1
ggaggatggaaagaaagtgaataactttctggaaatggataggggggaaggagtgaatgatggtttttctggacctggaccaaatgattcacttattcatggtcttattgatgatgtagccttgaattgtcttgcttgggttagtggatctgattatgccgtgctatcgtgtattaataaaaggttcaataaactgatcaatagtgggtatctatatgggttgaggaaacaattgggggctgtggagcatttggtgtatatggt

SEQ ID NO: 9309 - DNA, 198 bp, Glycine max
  Clone ID: 701102336H1
ctcgagattcggaagagctcaaagtcatgatttagctgatgctgtgaagaaatgaaagaaaagcgcaggtttaaggagcttctgataatggtggatacctgccaagcctctactctgttctcccagcttcattcaccaggtgttgtggcaattggaagtagtaagaaaggaggaaattcatattcacatcatgtggac

SEQ ID NO: 9310 - DNA, 266 bp, Glycine max
  Clone ID: 701102337H1
gggcaaggattttagcttccttggcccaatattgttcacctccctcattactctcatcctcactggcatgatgcagatgttcttccctcttggacctactgcccatgctatctatggtgcaattggtgctatgatattctctggctacattgtgtatgacactgacaacctgatcaagcgtttcacttatgatgagtacattggagcctctgttactctttatcttgacatactcaacctcttcctttccatcttaaggatcctca

SEQ ID NO: 9311 - DNA, 272 bp, Glycine max
  Clone ID: 701102338H1
ttcggtcactcgagcgaatcggctcgagggaaatgggaacccttgggagaccgatctacagcgttggtaactggattcgagggactcgacaggccattgatcgtctcggttccctcctccagggcggttactacgtccaagagcagctgtctaggcatcgaactctgatggacatatttgataaggctcctgttgttgatgaggatgtatttgttgcgcctagtgcctccgtcattggagacgttcaacttggaagaggatcatccatttgg

SEQ ID NO: 9312 - DNA, 266 bp, Glycine max
  Clone ID: 701102339H1
cggctcgagggaagttgtctgagtcagacccccaattgcagttccaataccacagaggccctctcctcacaggcaaaatctccgtaaacctaatttggtacggtaagttcaaaccttctcagaaagccattgttgctgatttcatcacctctctctcctcttccaaacccctcatcgcccaaccatccgttgccacgtggtggaaagccaccgacaaatactacaaaaactcgttccccaaacttgcactctccctagggtgccaa

SEQ ID NO: 9313 - DNA, 265 bp, Glycine max
  Clone ID: 701102340H1
gagaattgttcctctcttctcttccattcgtgtacgcgcaaaagaatcatgacgagttcctctgctgccgctcgcaagaatctgagtaagattgcctgcaataggctccagaaagagctcgtggagtggcaggtcaatccccccactggtttcaagcacaaagtcacagacaatctccagaggtgggtggttgaagtcactggagctcctgggacactttacgctaatgagacctaccagcttcaggttgattttcctgagaatt

SEQ ID NO: 9314 - DNA, 222 bp, Glycine max
  Clone ID: 701102342H1
cttaggagtctttcttcctttgtaatagaaagcacgcgtttctctctctcgctatctcaacgaatatctgtgtagttcaagccccaatccgcaacatccatttacaaaatatagttcatcggaatactctcaattttccggccagaaaccggcgaggtcgccggagaaatcgagcttctctcagacttgtagcctgttgagtcaatacatcaaggagaaggg

SEQ ID NO: 9315 - DNA, 263 bp, Glycine max
  Clone ID: 701102343H1
caagaattcatctattcatttcagtccatcagcatggcgaaggagaagaaaaacttgtccaacaagaacaaacagccaagcaatgcagacgaggttcacttccgcggagtccggaagcgcccctggggccgctatgccgccgagatccgcgaccctggaaagaagacccgcgtctggctcggcaccttcgacaccgccgaggatgccgcccgcgcctacgacgtcgccgcccgaaacttccgtggccccaaagccaaaaccaa

SEQ ID NO: 9316 - DNA, 264 bp, Glycine max
  Clone ID: 701102344H1
tcgaccagaggagtttgagaatggcaacgatcagcgcggttcaggtggagttcctggagtttccagcggtggttacttcaccagcctccggcaagacctatttcctcggcggcgcaggggagagaggattgacgattgaggggaagttcataaagttcacaggcataggagtatacttggaggataaggcggtgccatcactcgccgctaagtggaagggtaaaacttcagaggagttagttcacaccctccacttctacaggg

SEQ ID NO: 9317 - DNA, 261 bp, Glycine max
  Clone ID: 701102346H1
gtcgctccgcaccagtttcaccgcacgaatatcttgttgtttggagcgatccgagaaaaactctgtaaacatgttggtttaccaggacctccttacaggtgatgagcttctctctgactccttccgttacaaggaaattgagaatggaatgctgtgggaagttgaggggaagtgggttgttaaaggagcagttgatgtagacattggtgcaaacccttctgctgagggtggaggagaagatgagggagttgatgatgcagc

SEQ ID NO: 9318 - DNA, 263 bp, Glycine max
  Clone ID: 701102347H1
tctactctcacagctgtttattttcttcctcttctcaactgtgttcgtgtgtatgcatttgagttgaaagccagactcaaggagctgaaagacaaaagaagaaacttggatttgaatcagccaaaatttgagttacacgtaattgcaaagataagatgagtgttatgtatagtcctgttctcaattactcagatgtggagcatcagctaaggaaaaaccaagacatggattcaagtattggacatccacaacaacactgtcac

SEQ ID NO: 9319 - DNA, 264 bp, Glycine max
  Clone ID: 701102348H1
taaaatcaaccatgggttcagcagctgagactcagattactccaacccatgtatctgatgaagaggcaaacctttttgccatgcaactagccagtgcctctgtactccctatggttctcaaatcagctcttgagcttgatctgttggaaatcatagccaaggctggccctggtgttcatctttcccccactgacatttcttctcagcttccaacacagaaccctgatgcacccgttatgttggaccgcattttgcggctcttgg

SEQ ID NO: 9320 - DNA, 270 bp, Glycine max
  Clone ID: 701102349H1
ctctgccgaagataaaaccactggccagaaaaataagatcactatcaccaatgacaagggtagattgtcaaaggaagatattgagaagatggttcaagaggctgagaagtacaagtctgaggatgaagagcacaagaagaaggttgaggccaaaaacgctttggaaaactatgcatacaacatgaggaacaccgtgaaggatgacaagattggtgagaaacttgacccggctgacaagaagaagattgaggatgcaattgagcaagcaat

SEQ ID NO: 9321 - DNA, 268 bp, Glycine max
  Clone ID: 701102350H1
caaacacgctgttcctacaatcattccaaatgtgcccttccggtcgcaccctcctcccttcctccgtctccgatttccgaccggcattcgacgtcctcgatgccgaccgcgacggcaaaatcagccgcgacgacctccgcgccttctacgccggagtcggcggcggaggagatgacgtgatcggggcaatgatgacagtggctgacaccaataaggacgggttcgtggagtacgaggagttcgagcgcgtggtctcggcggagagaaa

SEQ ID NO: 9322 - DNA, 267 bp, Glycine max
  Clone ID: 701102351H1
gtcgctccgcaccagtttcaccgcacgaatatcttgttgtttggagcgatccgagaaaaactctgtaaacatgttggtttaccaggacctccttacaggtgatgagcttctctctgactccttccgttacaaggaaattgagaatggaatgctgtgggaagttgaggggaagtgggttgttaaaggagcagttgatgtagacattggtgcaaacccttctgctgagggtggaggagaagatgagggagttgatgatgcagctgttaa

SEQ ID NO: 9323 - DNA, 265 bp, Glycine max
  Clone ID: 701102352H1
cttcttctttttcatcaatcatcaccagtggttcttttccttctgagaagatcgaattgtgttttgcaaaaatgggagttccagagaaagaccctctttcccaattgagtttgcctcctggttttcggttttaccccaccgacgaggagcttctcgttcagtatctgtgccgcaaggtcgctggccaccatttctctcttccaatcattgccgaaattgacttgtacaagttcgacccatgggttcttccaagtaaagcgatttt

SEQ ID NO: 9324 - DNA, 140 bp, Glycine max
  Clone ID: 701102353H1
aaaagactccgcgtttccccttcccctcaaccacaatcaccagacactgcaccaaacaccaacaacgctttagctctctctcttctctccataaccgccatcgtcgatctggcactaacagatcgccgctggtacatctg

SEQ ID NO: 9325 - DNA, 260 bp, Glycine max
  Clone ID: 701102354H1
gcaagatgatgagaaggaaatgaaggccagagaattgattgaagaaatttgtgatgagcttgctaaggaaattggagaagacaaggctgaaattgaagcattgaagacggaatctatgaaacttagggaagaagtggaagaggagaggaggatgttacaaatggctgaagtatggcgtgaagaacgtgttcatatgacattgattgatgcaaaagttgctcttgatgagaagtactcacagatgaataaacttgtagcgg

SEQ ID NO: 9326 - DNA, 262 bp, Glycine max
  Clone ID: 701102355H1
gaaacatttcactaatagagagacataagcataatattgagaaataatggagggttgtacttattgtgtgaagttgctatgccttgttgggtttgtggtgcttgtgagtactattgcaggggtggagagtgctggtgaatgtgggaaatctaccaccccagataatgaggcttataagcttgcaccatgtgcctcagcagcacaagatgagaatgctagtgtttctcagagttgctgtgctcaggtgaagaaaattgggcag

SEQ ID NO: 9327 - DNA, 261 bp, Glycine max
  Clone ID: 701102356H1
ttcagattatcagagagcccaagaggcccgacgattcatgatttatgttcataccaagatgatgatagttgatgacgaatacataatcgttggatctgccaatatcaaccaaaggtcaatggatggtgctagggactctgagattgccatgggtgcttatcagccctatcatttggctaccaggcagccagcacgtggtcagattcacggtttccgcatgtcattgtggtatgagcaccttggcatgcttcatgactcctt

SEQ ID NO: 9328 - DNA, 186 bp, Glycine max
  Clone ID: 701102357H1
cagaatctccaataagcataaaagcctctccttcagatcatcatcaggcttttgatcagcaccttcaacagcagcagcaacaacaacaacaacaacaggagacagcaacagcaggcacatcatcacagaatcaatcagcagccaaatcacctcaagaaaagaggaaaggagctggttccacatcag

SEQ ID NO: 9329 - DNA, 76 bp, Glycine max
  Clone ID: 701102358H1
ccaaaactctcaaaagctcaaactcaaacggtagtttaaaaaaaaaacaaccgaaacgaaatccactctcaccatg

SEQ ID NO: 9330 - DNA, 258 bp, Glycine max
  Clone ID: 701102359H1
gatcagagtacatcctaaaagccttggagaaaactgcaagtggttggagatgtttgaagagaccgatgttgtaatgttctcagttgccttatctgactatgatgagtacactacagacagtaaaggagtttctaccaacaaaatgttggtagctaagaatctctttgaaaacataatttctcatcgaagcttccataacaaaaaatttctcctagtattgactaaatttgatctgcttgaggagaagattgaacacat

SEQ ID NO: 9331 - DNA, 256 bp, Glycine max
  Clone ID: 701102360H1
gtttctactctcacagctgtctattttcttcctcttctcaactgtgtccgtgtgtatgcatttgagttgaaagccagactcaaggagctgaaagacaaaagaagaaacttggatttgaatcagccaaaatttgagttacacgtaattgcaaagataagatgagtgttatgtatagtcctgttctcaattactcagatgtggagcatcagctaaggaaaaaccaagacatggattcaagtattggacatccacacaa

SEQ ID NO: 9332 - DNA, 260 bp, Glycine max
  Clone ID: 701102361H1
aaaaaattggcgtgagtcgggccaagcaagctaaggcaaaccctcgttggcaagtttgtgatggcggcctcttcttcctctctctctgcctccgacgactcttcttctcgccgtcgcaggcgccaccaccgccatcgccgaggccgcgataaggactctctcaagattcgaaagaagagcaagtcccaatcccaatcccgcggaaaacgacgccgtaggcattaccaccactcttccgattcctattcttcatcctccct

SEQ ID NO: 9333 - DNA, 97 bp, Glycine max
  Clone ID: 701102362H1
acagggttatattatatagatacaattattaagtataggatgaatttccagctgttgtaaatctttaaaccagtaatagatgaacggaattgatttt

SEQ ID NO: 9334 - DNA, 263 bp, Glycine max
  Clone ID: 701102363H1
gaaagctcggttgcaggcagaggcaaaggctgcagaagaggttcggaggaaagctgaagccgaagcagcaactgaagccaaaagaaagagggaactggaaagagaagcagctcgtcaggctttgcaaaagatggagaagacaattggtatcagtgagagtagtcaatttttggaagatctagagatgctgagtggtttactagatgaacatttaccaaatttcacagaggaaagaagtcctgatcatcttgaaaatgggctgg

SEQ ID NO: 9335 - DNA, 262 bp, Glycine max
  Clone ID: 701102364H1
gtcgccgttcagggcttttgcatgacccgctgcgggacccacggctctacccgcaacgtcaaaaacgctgcccggacagcttatatttgggttggaaactccgaaactcagtgccccgggcaatgcgcgtggccattccaccaacccatttacgcgccccagacgccgccgttagtcgcgcctaacggcgacgtcggagttgacggaatggttattaacttggccactcttctcgctggcaccgttacgaaccctttcaaca

SEQ ID NO: 9336 - DNA, 266 bp, Glycine max
  Clone ID: 701102365H1
tgccaatgagctgggaggtgcaaagttggcaagaagaaccttatccacgatgataatccaggcgttgtcacaggtgtcattagggctaaagatgttgactatttatccagggtagcagatgataaatggacaggagatgccattatttattcccatcttggtggagaagtggtttaccttccaaaggatgcatccatcccagttaccttgaaaaccagagaatatgaagttttcacaatagttcccgtgaaggaattgagcaatgg

SEQ ID NO: 9337 - DNA, 266 bp, Glycine max
  Clone ID: 701102366H1
cctaaacaagagaaaagtgatctacgtgtgattgatgatgcacgcactgctgatcggttgcttaattggatcaacaagcaattaggcagttcatttggcctggatgatcagaaatttcaaaatgagcttctttcatccaatgtatcagaccctgggcagattgcaagagctatctatgatgtcgaagaggcaacttctacagcttttgacatcatcttagagcacaagatgataaaaccgggaactcgtgcttcacttataaagtt

SEQ ID NO: 9338 - DNA, 257 bp, Glycine max
  Clone ID: 701102368H1
gcaacttttggtctctctgcagaatctcattccaattggagttcatcctctaaaaggaaaggtggtgtttggactctgggaaaatgggtttgttttctgggatttttatgggggtgttgttcggcatcgcattgatggctggatgggcacgcatgatgaggtaccgaagtgccaaacgaattgcaaaggcagctgacattaaactccttggatcccttaacagagatgatttaaagaaaatttgtggtgataatttg

SEQ ID NO: 9339 - DNA, 258 bp, Glycine max
  Clone ID: 701102369H1
atcgaattgctgtcgttagaagaggtgatttggaggatgtagaagagggaacagaagaccacaagtacccaagaatttcatataaacaacttagagaggccactggaggcttcagtgcttcaagcttaattggttcaggccggtttggacaagtctacgaaggaatgctacaagataatacaagagtagctgtgaaggtgttggatacaacgcatggtgagatttcaaggagctttagaagggaatatcaaattctga

SEQ ID NO: 9340 - DNA, 159 bp, Glycine max
  Clone ID: 701102370H1
ctgaaaagggttcttttctttcctttaaaaatttatacttcctctcttctgcacaattaaatttactatttctaaaatttacaaatttgttgaaatgaagctgtgcgcaaggtaaatatgtgtgcaaattgcccaatcttttcaaaggttggaccgtaa

SEQ ID NO: 9341 - DNA, 93 bp, Glycine max
  Clone ID: 701102371H1
gcaaagcaggagagagaggggggatgacaccacatcctctgttttcattctcattcttagttttccctgccattcaaatttccacacaacata

SEQ ID NO: 9342 - DNA, 260 bp, Glycine max
  Clone ID: 701102372H1
atacaaagcattgaattcaaaaacttaagttcattccttgtgttttgctttcttcctcaaaaccaaacatgtcgaacacatgcggcaactgcgactgcgctgacaagactagctgcaccaagggaaacagctatggtgttattgtagagactgagaagagttacatcgagactgttgtcatggatgttccagcagctgagcatgatgggaagtgcaagtgtggcactaactgcacttgcacggactgcacctgtggccat

SEQ ID NO: 9343 - DNA, 255 bp, Glycine max
  Clone ID: 701102373H1
aagcggtgagattcgtgaatctgagaaatgtcggattcttctcgggaggagaatgtttacatggcgaaattggcggacaggccgagcgttacgaggagatggttgagttcatggagaaggtagcaaagactgtggaggttgaggagttgacggtggaggagagaaatcttctctctgtggcttacaagaacgtgattggtgcgaggagggcttcgtggaggatcatatcctccattgagcagaaggaggagagca

SEQ ID NO: 9344 - DNA, 258 bp, Glycine max
  Clone ID: 701102374H1
tgctcgttgaatccatcctaagtgacttgcttgctgaaggcgacacgaggtagaaactaagaatgggggaagagaatgaagaaacaaaaacatttaaggatttgggcttatccgagtcattggtggaagcttgcgaaaaattgggttggaaaaatccattaaagatacagacagaagcaattcctcttgcattggaaggaaaagatgtgataggacttgcccaaactggttccggtaagactggagcttttgctcttc

SEQ ID NO: 9345 - DNA, 256 bp, Glycine max
  Clone ID: 701102375H1
ctggtttatagatctctgtgaagtcgctttataacactcaacctaagatgcagaacgaggaaggacagatcaccgagctttacattcctaggaagtgctctgccacaaaccgattgattaccgctaaggaccatgcttcggttcaggttaacattgggcatgtggatgagaatggcgtctacaatggccatttctccacttttgctctctgcggcttcatacgtgctcagggtgatgctgacagtgccctagatcg

SEQ ID NO: 9346 - DNA, 260 bp, Glycine max
  Clone ID: 701102376H1
atcctaatcagaaaaaaaaaaccctagtaatgccgccgatggggaggaagcgaaaggtagcacccaaatcttctctatccaccgagccacctctcaagcagcaacaaccaaaacccgaaaatccccctcaagaatacgaagaagtcgaagaggaagttgaggaagaagaggtagaggaagaggtcgaagaggaagaagaagaagaagaggaggacgaggaagaagaggaggaggaagaagaagaagaagaagaaaacgac

SEQ ID NO: 9347 - DNA, 257 bp, Glycine max
  Clone ID: 701102377H1
cttgttcggtggtggcagtggtgcatggagaggttacaaaaaagagaaagaagagcttgcaaaaatgatgtcatttttaattatttttttaaaaaaattttcttatgtaatctcatttaggcaaaaaatacacatgatattacacttcacatgcctcggagtctaagccacgcaagtagataatcgactaataaagtttttaaaatattagacatccgattaaaaataaatttattaggacttaagtgacaaaatat

SEQ ID NO: 9348 - DNA, 259 bp, Glycine max
  Clone ID: 701102379H1
ccttctcaaactagtagtattattcttccattccgttctacatataatcattcataatgggtgttttcacattcgaggatgaaatcaactcccctgtggctcctgctactctttacaaggccctagttacagatgccgacaacgtcatcccaaaggctcttgattccttcaagagtgttgaaaacgttgagggaaatggtggcccaggaaccatcaagaagatcactttccttgaggatggagaaaccaagtttgtgct

SEQ ID NO: 9349 - DNA, 254 bp, Glycine max
  Clone ID: 701102380H1
cacgcgccaagcctccttcgccgccgccgacaagagtctcgctcattctcccaggctttccatgcattcttcccactccaacccccgcagattctcgtcggagcgcgacggcgagaatttcggcgttcgccgggatctgaaccgaaccggatcgcgctcgttcccgccgatcgtgcctcacgaagaggaattcctctccgacgccgctccgcgcaagctcggaatccggccggaggatctacgattcggaggtg

SEQ ID NO: 9350 - DNA, 260 bp, Glycine max
  Clone ID: 701102381H1
gcaacagtagtagtagggagactgactcttttatgaaactaggatctaaccatattaatgatatagactctggtgtattatgtagaaagccagggaaaagaacggattaaaaattttattaacagggagttccgcgacagtaaataatgagggatgctctctactaatgtactctttggaggcggcgttctttttacaaaaattggccacatcagtttgccaataacttaactagatgtagataatatagattgctgtta

SEQ ID NO: 9351 - DNA, 266 bp, Glycine max
  Clone ID: 701102382H1
tcgaactcgagcgaatcggtcgagcaagaagaggaagttctgcttttagaagagcgtgttggagaggccaaaagattagccgtcatgaaaatgaaggagactggagggaagaagaaacggaggggcgaagaagattatgatggagaggatatagacaagtacttgggtctcaaggaaggaaaatcatccaaaaagtttagaagaagatgagatcatatcactgccaatgagtgaattaatgcgacggataaatgaatcatatgaag

SEQ ID NO: 9352 - DNA, 261 bp, Glycine max
  Clone ID: 701102383H1
caagctcgtcgtttcagaagcactgtctggtggagaaatgtcaagcttacgattgcacttatagtcgtcctacttgtgatagtttatgttgtattggcttttgtgtgtcatgggcctgcgctgccatcttgtttttaagtgaagaattggcaaatgaattttatgcgtgcttccttgtcttcttcagcttgcagaggtcacttctttttcatctgcctttgttatgcagacttccatttcttcaacttaaattgctgggtt

SEQ ID NO: 9353 - DNA, 257 bp, Glycine max
  Clone ID: 701102384H1
cgggattttgatgcccgttggtgccataatagcaaggtatttgaaggtgttcaaatctgcagaccctgcttggttttaccttcatgttacatgccaaacctctgcctacatagttggtgttgctgggtggggaactggtctcaaactcggaagtgactcggttggtattaagtataacacccatagagcactcgggatcaccctcttctgccttggaacccttcaggtttttgctctgcttttgaggcccaacaaag

SEQ ID NO: 9354 - DNA, 256 bp, Glycine max
  Clone ID: 701102385H1
cgcaaattccctcaacactggagtcactaagtgggactcggtggaaattcattctgggactcagctaagctgaccaaccatgattcaaaatggttgcattgtatcccaagggtgtgcccctctgaattctaggtcacgcaaccatgtcatacctagtacctctgtctttcgttgcgcttctcgaatgcctcccaaggttgccgtctctaacatccggagcttttggggacataatttggaatttcaatccttgttg

SEQ ID NO: 9355 - DNA, 101 bp, Glycine max
  Clone ID: 701102386H1
acttgatacaatttataaacaatacaaaagtaatacacagttccagtggttatttgcacacttaggaacatatgtaatgaataataaaaattatggttctt

SEQ ID NO: 9356 - DNA, 256 bp, Glycine max
  Clone ID: 701102387H1
gaagatcaacctcctctttggtacggtgttaagaaaacctatgttgcaaaaagaagtctttcacaagaagatgtaacgattcttgtagataatcatcatgatcatggcgtgcaccacttctccgccttcaagacaaagttcggcaagacctacgccacgcaggaggagcacgaccaccgcttccgtatcttcaagaacaacttgctccgcgccaagtcacaccagaaattggatccatcgccgtccacggcgtcac

SEQ ID NO: 9357 - DNA, 256 bp, Glycine max
  Clone ID: 701102388H1
gccagagtgatgtaaaggctgggggtgatgtgtgtggtcgagttggcattcttggcattgcttgggcctttggtggcatgatcttcattctggtgtactgcactgctggaatctcagggggtcacataaacccagcagtgacatttgggctcttcttggctcgcaaggtgtctttgattagagcaataatgtacatggtggctcagtgcttgggagccatatgtggagttgggttggttaaggccttccaaaaggc

SEQ ID NO: 9358 - DNA, 255 bp, Glycine max
  Clone ID: 701102389H1
cagaatcattaaagataagattatattgctaagaagaaaaaatatgaaggttgtctacttgcttgttgccctcttggctttgacatcaactgttgtctctgcctatgaccctagtcctctgcaagatttttgtgtggcagccaaagaaaaagatggtgtatttgtgaacgggaaattctgcaaggaccccaagcttgtcaaagcagaagatttcttcagacatgtggaacctgggaaaactgacaacccactagg

SEQ ID NO: 9359 - DNA, 253 bp, Glycine max
  Clone ID: 701102390H1
ctcgaaactgatgagttttaattaaactatgccatggtaatgaaaccgcgtttttcgtgtttcacactttgttcttgccagagtcaccccaaaacaaacctaaatcgccttctctctctctcgttcttttggccttgaaagttgaaagctccaatcttttgcatttttcatttcccttaatatttgattctttgtggagattttgcatttattcactttccttaaagtttgtttccttgtttgcgttttgtgg

SEQ ID NO: 9360 - DNA, 254 bp, Glycine max
  Clone ID: 701102391H1
ctcagattccggccactcctctcgccggcgagcccttactcttccctcctccgtcgagccctctccgattcgaatcgttcccagcctcgcaccaccatgaatcccgaatacgattatttgttcaagcttttgctgattggagattctggtgtaggcaagtcatgtcttctcctgaggtttgctgatgattcataccttgacagctatatcagtaccattggagtggactttaaaatccgcactgtggagcagga

SEQ ID NO: 9361 - DNA, 254 bp, Glycine max
  Clone ID: 701102392H1
tggcgtgcacaatcgacttccgctgtctcgacgaggacttcggcggcaaaacctacaagcgcaagacagagcagcagtcgcagcctcagcacgacgccgccgccgatgacgtcatcgacggcgcctctctgatggacaccgacgacgcactcccgccgccggcgaagcgatcggcgctaccaacgtcggagaacccggacaagccggcgttcggtcatccgagctacgacggcgtgatcgccgggagggtgtcg

SEQ ID NO: 9362 - DNA, 255 bp, Glycine max
  Clone ID: 701102394H1
gaaacagctatggaaggagaaaatggaaagaagctgaaaatactgtgcctccacggattcagaacaagtgggagttttcttaaaaagcaaatcagcaaatgggatccttctctattcattcaatttgatatggttttcccagatggtaaataccctgctggagggaagtctgacatagaaggcatcttccctccaccttactatgagtggtttcaattcgaaaaggacttcacagtgtactttaacttggaagaa

SEQ ID NO: 9363 - DNA, 259 bp, Glycine max
  Clone ID: 701102395H1
actgaatacaaaggagagcatcatgtcggtgagcacaagccggagcaccatggaggagcagagcacaaagaggggttcctagacaagatcaaggacaagatccacggcgaggagggtggcgccaccgccgagggcgagaagaagaagaagaagaaggagaagaagaagcatgcacatggccatgacagcagcagcagcagtgacagtgattagattatctcccactgctgcatcacctatatatcttataaggtgtatg

SEQ ID NO: 9364 - DNA, 257 bp, Glycine max
  Clone ID: 701102396H1
cagaaactctccttccaagccggtgaacgccactcccttgtatgcaattcccctttccattccatctacttcctggactcctcatcattcttaaaattaataaaaagctattaactttctattattattattactattttttaaataattgttcttgaatgaatggaattgagctctggcaggagtccttgtgtttagggttaattggtgtgagctgtgtgtctgatttcaggaaaaactctatcagtgggtctgga

SEQ ID NO: 9365 - DNA, 274 bp, Glycine max
  Clone ID: 701102401H1
cagaagcagaagcgcaaggcgatgtaaccctaattagggtttgcaagccgatttgggattcgcctttcgcgtgatcgcagcgctggatccgtaccgtgttcctccgtctacggaagcccctttcgctcgatccttcgccgatctcgaagcatgtacggtccccgagggtatgtcaacgcatcttcatctctctccttctttattccttttccatccaattgtttcttttccattttctcaatttctggggtttggtttctgtgcggtgatgctt

SEQ ID NO: 9366 - DNA, 275 bp, Glycine max
  Clone ID: 701102402H1
agcgctcttgtacatttttgggttgagctcattgatctcctcatcctctccatttttctatgattgctccacagttttcacgttacacttggtaccatttcagagagagttaattatagaaaattagacatgattttgttgggtacacttgtttcagcacactcccatcaacagcatcagcatactcatctctacctctagggccatactttaaacagcacaagccactcctatattccaaaccatccaaattcaactctcttgtaatcaatggc

SEQ ID NO: 9367 - DNA, 271 bp, Glycine max
  Clone ID: 701102403H1
attcgcttcctctctttcctcatccactatttctctccgttttctggccccaccggaaaacctcttccgttcgccggaaaaccgctttcgttttcggcgtttttttcacgtctccagaggaagctgatttcggtcttcttattcggcgtttgcattctctcgctatttgccgtggtagcttctgcgaggcgttggatctctctgtggttcggtttcagcgttgtattcagcgttcctagagaatgtggcgagcctggttgtccttcgaggc

SEQ ID NO: 9368 - DNA, 272 bp, Glycine max
  Clone ID: 701102404H1
tctagatcgccagccgccgctcctcgagccgctcgaatcgcttaattttgatttagttttccaccgcaacgcggaacctctttctcgaactggctaactctcaggcaagtcgctcggacgctgattccagcaacacgcggctggtgttgcactgtatgacgccctaaactccggcgcctccaacgccgtcgtcaagatcgtcgccgccgatctcgagtggtggttccatggtccgccctctcaccagtttttgatgcgcatgctcaccggcg

SEQ ID NO: 9369 - DNA, 274 bp, Glycine max
  Clone ID: 701102405H1
ccggtgtggcgaatgattactatttgagctcttccctctcacaaactcagaaaacaagtccaatgagcaatttccagagaatatcacacgaatcccaccctcccccagggtacggatctccttaccctccaccccaaccgggttaccatccgcaccgcctcatgaagggtaccctccgccgccgccgcctcacggatacggtgggtaccctccgccgcagccgccgcagcgtccgccgtacgactcctatcagggttacttcgataacgggcat

SEQ ID NO: 9370 - DNA, 268 bp, Glycine max
  Clone ID: 701102406H1
acggaagttgcgttatctgggattttgaaacccggggcattgctaaagagctacgagataatgaatgttcatctccaataaccagtgtctgttggtcaaagtgtggtcatcgaattcttgtatctgctgctgacaagtcattgtgctgtgggatgttatgagtggaaacacaacttcgcttaaagtttctatcttggagatatccaataatggaccaacccctacctcacgtaacaagtgtgccgatggaattacctccttctcacca

SEQ ID NO: 9371 - DNA, 271 bp, Glycine max
  Clone ID: 701102407H1
gttgatgataaattttggagaatatggtaccattactagtgctttaataatgagagatgctgatggtaaatcaaggtgttttggctttgtcaattttgaaaacccagacgatgctgccaaagctgttgagggacttaatgggaagaatttgatgataaggaatggtatgttggaaaagcccagaaaaaatctgagcgtgaacaagaactgaaaggacgatttgagcagagcataaaggaagctgctgacaaatatccaggtttgaacttgt

SEQ ID NO: 9372 - DNA, 275 bp, Glycine max
  Clone ID: 701102408H1
ttcaactctgcttcccctggcaaccttcttcttagttctctccgcttcttatctccagattgctggggcgaaagcacaaccgttgactagtctcaagcttaactctccgatccttcaggagtctattgctaaagagatcaatgaaaacctgaggcaggatgggaggctgctataaatcctcatttctccaattatacagttgaacaatttaagcgccttcttggagtcaaaccaacgcctaagaaggaactgagaagtacacctgctatatctca

SEQ ID NO: 9373 - DNA, 276 bp, Glycine max
  Clone ID: 701102409H1
ctttctctctaggcgcaaaacctcgtactgtttgtggcggctaaggatgtcagggaaaggggcgaaggggttgatcacaggcaaaacctccgccgccaacaacaaagacaaggacaagaagaaacccatctcgcgttcttcacgtgcggccttcagttcccagttggccgtatccaccggcttttgaagtcaaggacaaccgccaacggtagagttggggccacagctgctgtctactctgctgctatcttggagtatctcactgctgaagtattg

SEQ ID NO: 9374 - DNA, 274 bp, Glycine max
  Clone ID: 701102410H1
cttggtgccacaccgaattttcccaattctaattacagtcgtggaagggaaactgaaagcagagtgttgttcttctcgaaatcacacacggttcagatctagagaaagatccatattctcgatggagaaaatggagcagttcattgaaacttgccgccgatggatctgatgcgatcggagaagatgaccttcgttcagctcatcatccccgtcgagtccgcgcatcggccatctcctatttaggtgaactcggccttccccaattccgcgactt

SEQ ID NO: 9375 - DNA, 274 bp, Glycine max
  Clone ID: 701102411H1
taactttttgattcctaaattctctaaaattcgaaattgcaatttcgttaggggaaagagattgttctgtgtgtgagtgagtatggctggaaaaggcgagggtcctgctatcggaatcgatttgggaacgacgtactcttgcgtcgggtgtggcaacacgatcgtgttgaaatcatagccaacgatcagggtaacagaactaccccatcctacgtggctttcaccgacacagaacggttgatcggcgatgcggcgaagaaccaggtcgctatga

SEQ ID NO: 9376 - DNA, 275 bp, Glycine max
  Clone ID: 701102412H1
gagaagaagaaacttaatcgatcatcacttcacttcactaatacatcatggcagacgagacccagaacaagtatgagagctctgaggttgaggtccaggatcgtggtgtttttgactttctcggtaagaaaaaggatgaagaagacagcctcatcctcaggaggaggtcatcgccaccgagtttcaaaaagtcactgtctcagaccaaggagagaacaagcacagcctcttagaaaagcttcaccgatctgacagcagctctagctcttcaagtg

SEQ ID NO: 9377 - DNA, 273 bp, Glycine max
  Clone ID: 701102413H1
atttgaaggatacaattgtgaagggatttgggttcacggcggaagatgatgttacgattacggggttcgatcctcgagacgccgaggtagggcattccgtggagtaccaattcgacctcgaaatcgatcacaaggttattcccttcagctcctcgaagacgtcaaacactgggattacgtcgatcttcccattttccgggccgaggcccaatccggtttggtccctaaacgggcttcggctgacgggcttcccgttttgggctccttcgttct

SEQ ID NO: 9378 - DNA, 276 bp, Glycine max
  Clone ID: 701102414H1
gttgaggcagagctgaaggaggcatctgtgatatctatgggaactgaaattggtgagcttgatttggcaaatattcgagaactctgtgaccaggttttgtctctctcggaatacagggcgcaactctatgattatctgaagagtagaagaacaccattgcacccaatttgactgcaatggttggggagcttgttggtgctcgcctcattgcccatggtggtagcttattaaatcttgcaaagcagcctggtagtactgtgcaaattcttggtgctg

SEQ ID NO: 9379 - DNA, 251 bp, Glycine max
  Clone ID: 701102415H1
cttccttctggaactgctaatggctttttaggtgaggaaactgatggtaggccaggttgttctctagacacccgccgtgtatcttgtaaaagaaaggctgttgaacgaaatgttggacaatcttcagatggtggaagttctagctatagtagcatacagatggtagtacttggaacactcttcctactcaggcttatggggggatcagttttaacagatctgcccaacggatcaggtaaatgcgagacttg

SEQ ID NO: 9380 - DNA, 241 bp, Glycine max
  Clone ID: 701102416H1
ctcgagccgttctagatcgcgagccgccaggaattcggtccccacgatgctcaactcgacctttcccaaggaactccaaggttctacattatcaagcttgacaaatgcccgcttaagttttctagtattacacatcatgcaatcgtgactcagtgctcgggtctatcggtggtcatgtttggtatcttggagtggccaagtcatctgttgttgattcaaatgagatcaaggatgacaccgg

SEQ ID NO: 9381 - DNA, 271 bp, Glycine max
  Clone ID: 701102417H1
cactcttccctctcttctttctttcatccccaaatcaaaacctaaattcccaccttcaactttctcccccaaatcgagcaccaccactgtcacgcccattcatttatatttcattcgtatatatacatacagagagtgagtgaagagagagtgggaagaatggattcggatcaaggcaagcttttcatcggtgggatttcatgggatacgacggaggacaagctcaaggagcatttcggtaactacggcgacgttttgagcacttccgtcc

SEQ ID NO: 9382 - DNA, 268 bp, Glycine max
  Clone ID: 701102418H1
ctcaatagcttccttttcagcactttcactatagtatactttctgaacctctgagaatgacttcttcctcttccgcactcgttcttctgctcgcagcgattttcgtcttctccggcgtcgcacaatctccggcgtcgtctccgagtcccctgctactccaccgaaagctgccactccctcgccttcttcgtccaagtctccacccgctgtttctccgacaccttcaccttccggcgggatctctccgccatctcctccttctttagta

SEQ ID NO: 9383 - DNA, 267 bp, Glycine max
  Clone ID: 701102419H1
atttgattttgcacccttcatggtgttgattattgccatactaaacgatggtaccatcatgacaatatccaaggatcgagtgaaaccatctccaatgccagacagctggaagctgagggagatatttgccactggtattgtgtaggaagttacatggcactaatgacagtagtatttttctggatcatgaaggataccgacttcttctcggacaagttcggtgtgaggtctataaggaacagccccggagaaatgatggcagccctg

SEQ ID NO: 9384 - DNA, 270 bp, Glycine max
  Clone ID: 701102420H1
ccaattccaaattttcagtttcttcctcgcttttctgcaaaatcatctaaatccgtttctgatcctgaatcatcagtttttcccttgaaagatgggaggtggcaaggacaaacacaatgaagaagagaaaggagttttctcaatctggctcatggagtagctcaagctgctcatggttaccctccaggggcataccctccacctcctggggcataccctccttaccaagggtacccacctgctcatggctaccctccacaaggtggctat

SEQ ID NO: 9385 - DNA, 269 bp, Glycine max
  Clone ID: 701102421H1
gtcagagttcagtccttgtccgaaaggtgcacagattcaatccctgagaggtatatcaaacccctcagtgaccgtccatctgatgatgccgttgctgttgatgatgccaacatcccaatcattgaccttgcagggctttatgtggtgacccagatgctcgagcctccacactgaagaaaatatctgaggcttgtaatgagtggggtttcttccagatcgtgaaccatggtgttagccctcagctgatggacatggctagggaaacttgg

SEQ ID NO: 9386 - DNA, 268 bp, Glycine max
  Clone ID: 701102422H1
cttttacaaactgaagtgaatcggaggatctgttctgttccataagatggctggacttttgggatataggagccttccacctaaggcaaagaatttggtagttgctgggggtttgacagcttttgtctttggtgcctacttcacaccatgagggctgttggaggcactgatgaactgcaggtagcaattgataagtttgaagctgacaagaacaagaatgcgggcgatgccaacatgccatcaaaggtctaaagcttgtacaataaag

SEQ ID NO: 9387 - DNA, 273 bp, Glycine max
  Clone ID: 701102423H1
cctcgagccgaatcggctcgaggtcaactctcgttcaatcaccagcgcttaagcgtgtctctgctaataccaaaacgctaccgttttgctcttttatttctctatggattgcaagaagcgagttcgggatgactcggacgagtcattctggaatcgcccgaggcgaagcgactcagggcacgatttactcgagttcttcgacgacgccgacgacgcaccttcctctcaggaccttgactccgtcatgaagagcctgcaggaggagatttccgg

SEQ ID NO: 9388 - DNA, 274 bp, Glycine max
  Clone ID: 701102424H1
attttcaagctctcaacgccatctccagctgcttccttatcagaagcgcttcgccccagagattctcgcttcctctccttcaatccttcttccaacgctattaattacaaaattaacctctccgcttccctccgatccattcactcctccctcttaaaacctccttgcggatcaaatgctcccaaacagatgggaatggaagtcctgcaaagaggacagtgcttcatgatctttatgagaaagaagggcagagtccatggtatgataatctctg

SEQ ID NO: 9389 - DNA, 271 bp, Glycine max
  Clone ID: 701102426H1
aaaacgcattgtgtttctctctttccgcggcgtagatctgagcagtttgggaaaccctaactgctctcaccactctcactgctttttttcctctccgatcaacgacctctttcgtcgccctaagtcatggcaggacttgcacccagggatcacagtttgatcctcgtcaatatgataccaagatgaatgagttgcttacatctgatggacaggattttttcacatcttatgatgaggtttatgacagttttgatgctatgggcttgcagga

SEQ ID NO: 9390 - DNA, 76 bp, Glycine max
  Clone ID: 701102427H1
attaattagtaagaagattaactgagatagcacaagggtaaaaatggaaatggaatttatcccgctgtctcccaac

SEQ ID NO: 9391 - DNA, 277 bp, Glycine max
  Clone ID: 701102428H1
gttcaagttctcttcttggaaatttcccctctaatggaggctagaaaaagagagcaaaaaaactaaaaaatgcctgcggtcggaggtataaacaccggagggggcaaggagtaccctggaagcctcactctatttgtgacggtaacatgtaagttgcagccatgggtggtttaatcttcggttacgatatcggaatttcaggtggagtgacgtccatggatccgtttctgctcaagttttttccgtcagtgttccggaagaaaaactccgacaaaac

SEQ ID NO: 9392 - DNA, 270 bp, Glycine max
  Clone ID: 701102429H1
ggaaaaggtgaagggtgaagagctgtttatctctcgagtgctgaaaaaaaggaaatagcagaaagttatatggatagcaaatcaccgagcaataaggcatctgaggagctgtcacgtgagttgcttattgctatatctgattcttaccagataaaattctggattcagattttgtgcctgaacgcaaggacacagacggatttgcaagaccaaaaggtgattggcatgacaaatttaggtctgaattgatttcaatctcctatgttgaat

SEQ ID NO: 9393 - DNA, 276 bp, Glycine max
  Clone ID: 701102430H1
gtgacgtgccctagccccatatctagtctccctctctcaatctcacatctctcgtcgccaccgccgcgccgcacggaggcacccacggaaccaatctagccatcagttgaaacagtgagcttacaaaaaatggcaactgcacctgcacaattcctacaagctttggccatgagttgagggcttgtcttcgttgccgccttgtcaaaacctatgatcaggtcttagtaccctactaccctttatttttcatcattgttttttgtttacaatttctgt

SEQ ID NO: 9394 - DNA, 273 bp, Glycine max
  Clone ID: 701102432H1
gcagtaccatgacttctgcccttgagaaggtcataaaggatattgatgcacttgatagtgctagtgagaaaatcacaggtatagtggctgatgtgaacatggcatgggccttggaactcacagataagctaggaatcaaaggtgctgtcttcgccctgcttcagcagctgttttagtcttgggtgagaacattccaaacctcattcaagatgggatcataaataccgaagggttcccgattataaaagggaaatttcaactatcccagaaatg

SEQ ID NO: 9395 - DNA, 266 bp, Glycine max
  Clone ID: 701102433H1
aggccaaacaccaacagaagatatcatgttggagaaacaacttttgaatgatgaaaagcaatgtgcagagcacataatgctagttgatttggggagaaatgatgttggaaaggtctccaaaccgggttctgttcaagttcaaagcttatgaatattgagcgctattcccatgttatgcacatcagctcaacagtcacaggggagttattagatcacttaacaagctgggatgcattgcgtgctgctttacctgttggtacagttag

SEQ ID NO: 9396 - DNA, 266 bp, Glycine max
  Clone ID: 701102434H1
agaacagaggcatcagttgcaatggctcgttacggatgaggcgcgacaagcggtggatcgtggaggagcgccccgacggaaccaatgtccacaactggcattggtccgagaccaactgcctcgcatggtccacgacggtcttaccagcctcctcaataacctccctatcctcgacggcgagggtaacctcttcctcggaacgacgtcgcttcgctccctcgacggcgaggcctacatcaatgtccgacaggggacgatcatccccg

SEQ ID NO: 9397 - DNA, 267 bp, Glycine max
  Clone ID: 701102435H1
ctctaacctacctctctatcttctctctcaacaacttcaccttcttcctacgcgatcctgtctgcacttcaagggcaagtaccatgatgagcttatcgccaatgctgcgtacattggcactcctggacagggtattcttgcgctgctgagtcaacagggacaattggcaagcgtttggccagcatcagtgtagagaacattgaatgcaacaggcgagctcatagggagctgcttttcactgatcctggtgttacttcaatatctcag

SEQ ID NO: 9398 - DNA, 266 bp, Glycine max
  Clone ID: 701102438H1
cagagagagagagagagagacactgagagaaattcgcaaaccctaatttcggacagatcggcgatggctgcctccaaggatcgcgagaacttcgtctacatcgccaagctcgccgaacaggccgagcgatacgaagagatgtggaatcaatgaagaacgttgcgaatctcgacgttgaactgactgtggaggagcggaatttactttctgttgggtacaagaatgtgattggtgctcggagagcatcgtggaggatcctgtcttcc

SEQ ID NO: 9399 - DNA, 267 bp, Glycine max
  Clone ID: 701102440H1
gcaaacttctcattaatcgctatagtgctagtgattcattgcaattttgcataataatgactttctattcactacgtttatcacgtgtttcgcttctctattctgttttctctacgtatcgccatagcctctgctgatctatctcagatttctatgcatcaacatgacccaatggcctctctaccataaaatctgtagtgaaaagtgcagttgctatagagcgtcgcatgggggcatcattgttccgtcttcatctccatgattgct

SEQ ID NO: 9400 - DNA, 271 bp, Glycine max
  Clone ID: 701102441H1
cactcttttctctgctgtttcggcactgttttgagtaggtagatgaggaaaaaggattaaccaaatttgagtgggcatcaaagttggcatagcagaagtggaatcagctcttgtttcaagcaacaggaacatggatgcacaaccaagaaaaaagcattgtttcgtgctaaattgaatgcccaaaagaagaaaaagcgcatagaatctccccttgtaaggtataatgaatttgatctacctgtttgccgggtttgtgatgttgttctaaagt

SEQ ID NO: 9401 - DNA, 268 bp, Glycine max
  Clone ID: 701102442H1
cagcactaatttatatagcaagctagctaggttgaaaatagtttggttttgtagtaagtgaggtgaggtgccaaaatggtgaagataactcttggtactttcgatgactcttttggtgttgcctctcttaaggcttatttgcagagttccatgcaactctgattttcgtgttcgctggtgttggttcagccatcgcttacaacgagcttacaaaagatgcagccttggatccaacggggctggtggcagtagctgtggcccatgcatt

SEQ ID NO: 9402 - DNA, 264 bp, Glycine max
  Clone ID: 701102443H1
gagactttcagtactccagtgttaactgttttggtgtttacatctgtggcagtattccccaccctacttttgccttctaccccttccatgtgggtggctggaatgacatttggttatggctttgggttcttgctaattatactgcagcagctattggtgtatcactcccttttgtcattggcaaactcttccaccataaaattgaagggtggctggagaagtatccgaaaaaggcttctattctaagatctgctggtggaggga

SEQ ID NO: 9403 - DNA, 269 bp, Glycine max
  Clone ID: 701102444H1
attctacggcatcgagtccctcctcgtcaattccctttccaacccttctcaattggaaccttttaatctccaaaaatcgcttcttttacccttgaacggacgcgattccccctccgccctcgccgccaccgcttccggcgcctccacgtcgcgcacggcagcaagatcacctccttcgactggtccctccgccgcaaatccaccgtcctgactcaatttaccgccgtggattccctcctcgccctctcgccggccctcgccgccgccgg

SEQ ID NO: 9404 - DNA, 267 bp, Glycine max
  Clone ID: 701102446H1
attacaacaaccaagaagggctcaattacctctgtccaagctatctatgtgcctgctgatgacttgacagatcctgctcctgctaccacttttgctcacttggatgccacaacagtgttatcacgacagatctccgagcttggatctatcctgctgttgaccccttggattctacatctcgtatgctttccccccttattttgggtgcggatcactatgaaactgctcgtggtgtacagaaagtacttcagaactacaagaatcttc

SEQ ID NO: 9405 - DNA, 167 bp, Glycine max
  Clone ID: 701102449H1
tacgaactgagagggctggaggatggagtggagatattagtaggaaaagggcacttgaagaagcctttggcagcatctgggtttgctgagacaataataatcatgcaaggctggacatgcttattttaacatggtgttagatactttctaaatcctaagggcatgca

SEQ ID NO: 9406 - DNA, 265 bp, Glycine max
  Clone ID: 701102450H1
cttcccctatggctcgtcactccttgctcttagccctcctcctcttcgccgccgtcgccaccgccgcgatggcggtggccgcgtccgacgccgacgacatcctgatccgtcaggtggtgccagatgttggcgaacccagaggaggacaacctgctgaacgccgagcaccacttcgcgagcttcaaggccaagttcgccaagacctacgccaccaaggaggagcacgatcatcgcttcggcgtcttcaactccaacctccgcagag

SEQ ID NO: 9407 - DNA, 265 bp, Glycine max
  unsure at all n locations
  Clone ID: 701102451H1
ctcgagccgctcgagccgattcggctcgagcaaaacatacacctcttctctctgtttctctaccctctctacctcnctccctcttcaactaacatggcacttgaaaaccaagacaccgctgtcagagaaatcaagcccagaacaggagaatcatgggtgctggagggcctgatgatgaggacaataggtggccaccgtggttgaagccactgctgaaagagagcttctttgttcaatgcaagttgcatgctgattctcacaagag

SEQ ID NO: 9408 - DNA, 261 bp, Glycine max
  Clone ID: 701102452H1
gagagtgacatcaagtggccatctagatgggatgcttactcgaagatggagggagctaaagtgcattggttttctatccttaattcgcttatggtgatcacttttcttgctggcattgttcttgtgatcttcctaagactgttaggagggatctgacccgttatgaggagcttgataaggaggctcaagcacagatgaatgaagaattatctggttggaagcttgtagtgggagatgttttccgtgctccatcgaatcctg

SEQ ID NO: 9409 - DNA, 263 bp, Glycine max
  Clone ID: 701102453H1
ctgatattctctcttgcaagatatgaagctgtaatagatgcttacttggatggtcttgaggcatctgggttaaatgacctctctagagttacaagtgttgcctctttctttgtcagtagagtggacactctcattgaaaggcccttgagaaaattggcaccccagaggctcttaatctacgtgggaaggcagcagtagcccaagcagcattggcttaccagctctaccaaaggaaattttctggtccaaggtgggaagctcta

SEQ ID NO: 9410 - DNA, 241 bp, Glycine max
  Clone ID: 701102454H1
cagcttttctacatacaaagaacctttataaaaaatactagaaaaagaaaagtataatagaaatctatttaattgtttttctttttaattttaaccgacatcagattacggtgttggtctaccacggtaggcttgcttcaaacagagctaggtttctgcgcgggggagcacagctgcgacgaccctgggcacgcctgcaggcaattgtcccccaggctgccggaaaccgctgttccggccg

SEQ ID NO: 9411 - DNA, 265 bp, Glycine max
  Clone ID: 701102455H1
atttcacatcatctcgaacgaacgggggacctctcttctttcggattcgccaagctgttgtttgtgattgtttcagttcattattaaactctcgctctataaatacacttccaaacctctttcgagatctgaaaaacatcccatggaccgtcgtaaagagaaaaatgctccatggttatcggtgccgcaatttggggactgggatcagaagggccaagtgccggactactcacttgatttctcaaagatccgggaaactaggaac

SEQ ID NO: 9412 - DNA, 267 bp, Glycine max
  Clone ID: 701102457H1
ggccgccgaatcacaacctcaactaatcgaagagagaagagaggagcaagaacttaagtacctggaatttgtgcaattcgcgaccatccaggccctgatgcgctgcgccatcctctactcctacgccaaggagcgcgcggtcctctgaagcccggcgtcaacaccgtcgaggaggccgtgaagaccgtcgtggctccggtctacgacaggttccacctcgtccccggcgaggtcctcaaatacgccgatcgcaaggtcgccgaattg

SEQ ID NO: 9413 - DNA, 108 bp, Glycine max
  Clone ID: 701102458H1
tctttttccccttttattgcatggtttgttaatcaatgtagaccaaagatagggacacaagtttaaagagagtcattgaaaagaaatccctacttccacggatgatat

SEQ ID NO: 9414 - DNA, 267 bp, Glycine max
  Clone ID: 701102459H1
ccctcgagccgattcggctcgagcacaagtgcaaattgaactaattgacctagcaaacttctcattaatcgctatagtgctagtcattaattgcacttttgaataataatgactttctattcactacgttataacgtgtttgcttctctattttgttttctctacttattgccatagcctctgctgatctatcttcagatttctatgcatcaacatgccccaatgccctctctaccataaaatctgcagtgaaaagtgcagttgcta

SEQ ID NO: 9415 - DNA, 264 bp, Glycine max
  Clone ID: 701102460H1
catcgagccgaatcggctcgaggcgaaagctacgagactcgtccaatctcgaaacccgcttcagcatgcagcaccccaacacgtccctgctcactgtaaccgcttccgtaaatctcaagctgctgtgagggagagagagacaggaagggtgaaggggaaaaccaggatccaagttttgcacgataggttctaaaggtcgtccgctagatgctcagatgggatcgactcaacgaacacttccaagagttgggaaacgcgttagat

SEQ ID NO: 9416 - DNA, 256 bp, Glycine max
  Clone ID: 701102461H1
cccctctcggaggatgaaatcctccgagaaaagatattccgacacgtggacgaggcgtgtcgggagtgggggttcttccaggtggtgaaccatcgggttagccatgagttgatgaaaagttctagggaactgtggcgcgagtcttcaaccagccactacaggtgaaggaggagtatgccaactcacccaccacttatgagggctatggaagtcgcttgggagtgcagaaaggtgccaccttggactggagtgacta

SEQ ID NO: 9417 - DNA, 271 bp, Glycine max
  Clone ID: 701102462H1
ggagatattcccagaggatatacttacaggttgtatatcctgttggaagaaaatatatgtcagtgccttcagctcctcgcctgaagttagtatcttctcctgagctgaaagctgtattttccattgatgatgtcaagctacctcttggttggacgggatgtgcttggcagaatatcttccaaatctagaagaatatcttgggaaacaggtcttagaggctgtttcattaattgaagttagaaggcacttcattgaagcattatccagtccg

SEQ ID NO: 9418 - DNA, 269 bp, Glycine max
  Clone ID: 701102463H1
cctaaccctaggccaagatttacctgatggaaaccttggtgccttgcagaagaagggtaatgttgccaaagacaaattctccaaggtgctatggtatgccataacaaattacaggacatgggtttttgccctcctatatgggtaccgatgggagttgaattaaccactgacaatgtcattgctgagtatttctatgacaggtctaatctcaagctacacactgctggaatcatggctgcttcatttggaatggcaatctcctagctcgt

SEQ ID NO: 9419 - DNA, 275 bp, Glycine max
  Clone ID: 701102464H1
cgctatggcttccttaagctcctcattagtgatgctccttgcagctctaattctatcccctcaagttcttgctgactatgagaagcccccaatttacaagccacctgtttacacaccgccagtttataagcccccagttgaaaaaccacagtgtacaaacctccagtttacaagcctccagttgacaaaccacctgtttataagcctccagtttataagccaccagtttacaagccaccagtgtacaagcctccagtgtatcaaccaccagttta

SEQ ID NO: 9420 - DNA, 263 bp, Glycine max
  Clone ID: 701102465H1
atttgatgagctcgatgatagtcatgatataaagattaacaaggatgaatttgcggatatttgcaatgccattgctttaaaatttcagaaggaagatgttatgtcttactttgagtatttagcattctaccattcaccagctcaaagagattaacagaatttgtgaggagtcctatgtttggatacctagtgtcctttgttctcgtaataaatctggttgctgttattattgagacaacgcttgatatagaaaacaattctgc

SEQ ID NO: 9421 - DNA, 263 bp, Glycine max
  Clone ID: 701102466H1
ctattcttacaagttacatccattgagaaacatgaaggtctcccccttagcattttcaatcctttttttgtccttcaccatagaactcttcattggcattgcttcagcagcacaagaaccagtgcttgacacctcagccagaagctgagaacaggtgtcaagtactacattctaccagtcttcagaggcagaggtggaggcctaacagtttcaagcagtggcaacaacacatgccccctctttgtggtgcaagagaagcttga

SEQ ID NO: 9422 - DNA, 263 bp, Glycine max
  Clone ID: 701102467H1
gtaatttgcaaacacaccaaaaccatctctctctctctctctctctccaattcagacccctagttctgttggatcttgcatatagtaaccctttattgattcgcaaagatgaaggtcacagtggtttctcggagtgaagagaagtggttaaaggtggcattgagctcagtgattctccaagaagtacccatcaaggcagcgcttgacacttccagtccaacctggatcaaaggaaaggcctgttgtccttaattacaaaaaga

SEQ ID NO: 9423 - DNA, 263 bp, Glycine max
  Clone ID: 701102468H1
ccaaatccgaatccaaccctctccaacgtcactctcaccctctctctgttttctgtctcttctttcttttatcacacaacaacatacacacgccctcttcttcttccttgcatggactaactcagagactaaaccaaccaaaaaaaacaacatgtgttccgcagagaaggacgggatcatgctcttcggcgtgcgcctctccgtcgtggataaccaccccacctccttcagaaagagcgctagcatgaccaacctttctcagt

SEQ ID NO: 9424 - DNA, 261 bp, Glycine max
  Clone ID: 701102469H1
cgtagatatggctgaaactgacatccaagactatctccaactcttcttcctctggttactctccatcatcgccgttagagccatactcaccaaactccgccacaagcctcgccgtccaccgggcccacggtccctcccatcatcggccacctccatctcatctccgccctgcctcaccagtctttccacgcgctctccacgcgctacggccccgccgtgcaagtcttcctcggctccgtccccgccgtggtcgtttcgtgc

SEQ ID NO: 9425 - DNA, 260 bp, Glycine max
  Clone ID: 701102470H1
agttgccggatttcgcacttgtggttggcacgaatgattgtcacagagagtgttttagcaatgattctcgtactgcgtatgctaatgtcaatggattagggtgcatggtgtggcatggggacttggttgatattcaacatttggaaagtggaggaaatacattgtacatacgcctcgctcattctgatttagatgatggtggaaaaacgaacagaattgtgataatatcaactgttgtggcggggttaatctgcctagga

SEQ ID NO: 9426 - DNA, 140 bp, Glycine max
  Clone ID: 701102471H1
gaaattcctaacatgtcccctggacgcagtgccaggggagctgaaatgcctgcaacagctgaggcgccacctctggttgccgttgtaaatgatgaattatatgctgctgattatgctgacatggaggtaaaaaaatcgac

SEQ ID NO: 9427 - DNA, 262 bp, Glycine max
  Clone ID: 701102472H1
cttactgcttacaacacatgttggtgggcttggtttgaacctgacatctgcagatacccttgtttttgtggagcatgactggaatccgatgcgagaccttcaggctatggatagagcacacaggttaggtcagaaaaagtagttaatgtccatcggctaataatgcgtggtactttggaagagaaagttatgagtctacaaaggttcaaagtctcagtggctaatgctgtcattaattctgaaaatgctagtatgaaaacaa

SEQ ID NO: 9428 - DNA, 262 bp, Glycine max
  Clone ID: 701102473H1
gaaaaaggaggaaaaggtggtggtgggcgtgccagtgccagtgtattacggtggagaaaatgaataccaaaggggaatcatccctcctaacgccgtgtttggagatccaaagggcatccccatccagcaaaccatttcagggacactcctgctcctttcaactgcccttactgcgctcataccgctctcactaccgtcagatcaaagcccagtctggcagcatttgttggatgcttgatgccaatgatgcttggagtttgct

SEQ ID NO: 9429 - DNA, 263 bp, Glycine max
  Clone ID: 701102474H1
aatccatgtacttgttgacatgcaaaatatggttgttcttgaatttgaagatcgtaaacttgtcccccttccacctgctgatccactcagaaattatacttctggtgaaacccaaggaggagttgaccgaagtgatggaaacccttgcagattattcagcctgaaggtccaagttttcgtgttaatgggcacttcattgaatggcagaagtggaattttcgtattggattcactcctagggagggtttggttattcattcagt

SEQ ID NO: 9430 - DNA, 237 bp, Glycine max
  Clone ID: 701102475H1
gtcctgttcaggccatcttttgcatgtgccacttggcctctgacacaaacttttctcttcggaaccaatcatttttcatcaacttcagcttttacacaacacttcatttacacttttgtgcttagcttcatcaacatgacaacatgggtgacccaaagagcatcatacatgagctgctacaaggtttggaattggcaaggcaactccaagtgtatctccacctgccaacttcgtccc

SEQ ID NO: 9431 - DNA, 262 bp, Glycine max
  Clone ID: 701102476H1
cgtttatttaagagacattgtggtgagttttctattagcgggtcgtgacaccatcgctgccgggttaacgggcttttttatgttgttatcgaaaagcccggaggtggaggagttgattagggaggaggtgggccggtgatgggcccgggccaggagtttccttcgtttgagcaaatccgcgaaatgcattacctgaacgcggcgattcacgacagcatgaggctgttcccaccgattcagttcgattcgaagttcgccacgg

SEQ ID NO: 9432 - DNA, 256 bp, Glycine max
  Clone ID: 701102477H1
cagaaggtagttgaaataataaacccagaggatgattacatttggattcatgattatcatttgatggtgctaccaacttttataagaaggcgttttaacagggttaaaatgggatttttcctgcatagccctttccatcgtcagacatatataggactcttccagtcagggaagagatactgaaagctttactaaactctgatatcatcggattccatacctttgactatgctcgtcatttcctttcctgttgcag

SEQ ID NO: 9433 - DNA, 269 bp, Glycine max
  Clone ID: 701102479H1
gtcggaaaagaaaatggagttgttcttctacacggtgttcggtcctttggccgcggttgtggcagttatggagctgagcaagaacaacaaggatcgaatcaacacctcttccgcattcaattccttccagaacaactacctctcgtctattccctcatgatggctggagattggctacaaggtccatatgtctaataactcgacagtacatatggatacgggaaaggggcataggacaactcttcattgctggttttggaccttcatgc

SEQ ID NO: 9434 - DNA, 250 bp, Glycine max
  Clone ID: 701102480H1
cggctcgagggcaatatgcttgtcctcctggggatagattggccagacgcaacagccttggtactggtggttcgtctgttgaagctgtatctgatagtcaagagttgagaagtgtggagtgcaatcatttgtcaaacagtggggagatgatttggatagaacagagtctcctgaagctgcttcaaattctagtgtgattacatctggtggttcctctgaagatattgtatctgtgtcagtggctgggtgt

SEQ ID NO: 9435 - DNA, 260 bp, Glycine max
  Clone ID: 701102481H1
gttttcattggagttactattggtggaaccttgttcaaagcattcaagagaattagggagcacccgacgttggatgaaatttcatccttgctagctgaaagcctcccaggcaatgctacttttttcttgaccttgtggcccttaaatttttcattggctatggccttgaactgtcccgaatagttccccttattatataccatttgaagagaaaatatctttgcaagactgaggctgagttgaaagaagcttggcgtcct

SEQ ID NO: 9436 - DNA, 257 bp, Glycine max
  Clone ID: 701102484H1
cttaaccgctctcctcctttttagttgttccccttaatcttgttcctctcatatttttcttttttcttattagatcagattgaacaaaagggttgctctttattttttaatcttgggggaataatagaaatagaataagaaaagattagtgaggttgaaatgttgcaacaacgatcggtgccggcaccgttcttgacgaagacgtatcagttggtggaggatccggggacggacgaggtaatatcgtggggtgaaag

SEQ ID NO: 9437 - DNA, 257 bp, Glycine max
  Clone ID: 701102485H1
gtttttgccctgctccttttaggcagttccttgagattgtagtgaacatgaagtttgatgaagaacctaactattccaggctaatatctttgcttgatggtatgcttggaccgaatcctgcattgaggccaataacactgaaggtgctcaaaaggtcgggcagaagaggggtagattgaatattgaggaagaggatgattcacagcccataaagaaggttcgtttgggggttcctgctacacaatggatttcagttt

SEQ ID NO: 9438 - DNA, 258 bp, Glycine max
  Clone ID: 701102486H1
gagaaggctgtgcttgaatttggagaacagaatgggttggaagttgcaactgttattgctcctttcattgttggtcgttttgtttgtcccaagcttcctgactccattgagaaagctctgcttatggtgttggcaaaaaggaagaaattggtgtcattcgttaccatatggtacatgtggatgatgtcgctagagcacatatcttcctgcttgagcatcctaatccaaaagggaggtataactgctcaccattcattg

SEQ ID NO: 9439 - DNA, 261 bp, Glycine max
  Clone ID: 701102487H1
attcttcttctcatttcaactctttgcaattgcgatctttcattccttgttttttactcttggtaagcgcagttcggtgttggagaaccagcttccagttccagaatactgctgaacagagttcggcttcgcttattgggactcagttgtgtttctactaggttatcttctctgaattgcaaatgaatgatcgttgaaaaaccatgaagaaggtgaggagaaagatcggcaagtatgaggtgggtcggactattggcgaag

SEQ ID NO: 9440 - DNA, 264 bp, Glycine max
  Clone ID: 701102488H1
cttcaaacataacttctttgtgaaccaaattgatattatggcagaccctcagaaaattcaccctgtgcaccatgatgttgaggcacaaaaccacccttcagcaccattggtgccaaggagcatgtccaaatctgatcaggtgatccacaacgagtagtagtacaacaacaacaacaaaacattcctctgaagcaaaccaagccaccaccgaagaaaagaagaagctgctgctgcaggttcttctgttggctaataagcatattg

SEQ ID NO: 9441 - DNA, 261 bp, Glycine max
  Clone ID: 701102489H1
gtgaagtttgtttattctgagaaggaagagagaatagaacgccatggatgagatattgcacaaggtggggtcttactggttctccaagaaggccagcaaggaatttaactctgtcggcgatgatatcaactcacttcaaccagtattgaagggggaaccaaatggttggtcaacaagttaaaaggaaagatgcaaaaggcattaacagagttgctaaaggagtatgatctacccataggaatctttcctcgcgatgcgaca

SEQ ID NO: 9442 - DNA, 260 bp, Glycine max
  Clone ID: 701102490H1
gcagcagtgcagggaagttggtgtgtgtcaccggtgctgccggttatattgcttcatggattgtcaagttcctacttgaacgtggttacactgtcagggccactgttcgaaacccaaatgatcacacgaaggtaaacatttgctaaaacttgaaggtgcaaaggagagactgcacctttttaaggcagatcttttgggtgaaaattcttttgactccattgttgagggctgtgatggcgtctttcatactgcttctcctt

SEQ ID NO: 9443 - DNA, 241 bp, Glycine max
  Clone ID: 701102491H1
tcgagcctctaacctacctctttttcttctctctcaacaacttcaccttcttcctcctcgatcatgtctcacttcaagggcaagtaccatgatgagcttatcgccaatgctgcgtacattggcactcctgaaagggtattcttgctgctgatgagtcaacagggacaattggcaagcgtttggccagcatcagtgtagagaacattgaatccaacaggcgagctcttagggagctgctttt

SEQ ID NO: 9444 - DNA, 260 bp, Glycine max
  Clone ID: 701102492H1
gtggaacaattggacatatagcaccagaatacctctcaactggaaagtcttcagagaagactgatgtttttggatatggtgtgatgcttcttgaactaataactggacaaagggcttttgatctagctcgacttccaatgatgatgatgtcatgttgcttgattgggttaaaggacttctcaaagacaggaaattggaaacactagtagatgcagatttacatggtaactacaatgatgaggaggtagagcagttaatcc

SEQ ID NO: 9445 - DNA, 235 bp, Glycine max
  Clone ID: 701102493H1
attctaatcatctgggttttgctggatcagtaaattcaggaattacaacctttgagatggagtatggacactgggtgaatgagcaaaatagacaaatcacagaactgagaaatgctttaaatgctcatattggtgagtagagctcaggatgttagtagatggtatgatgagccactaatgccgaaatgtttcgcatgaactctgctgctgcaaaagcagatgttttctatgttat

SEQ ID NO: 9446 - DNA, 265 bp, Glycine max
  Clone ID: 701102495H1
acatctgcagagcctgcttggttttaccgtcatgttacatgccaaacctctgcctacatagttggtgttgctgggtggggaactggtctcaaactcggaagtgactcggttggtattaagtataacacccatagagcattgggatcaccctcttctgacttggacaccttcaggtttttgctctgctcttgaggcccaacaaagaccaaaaatcagaatctactggaacatttaccataagccgttggatatcccacataatcat

SEQ ID NO: 9447 - DNA, 269 bp, Glycine max
  Clone ID: 701102496H1
cacaaacatttactaagatcaatccacacactccatcatcatgcatcaagcaattccctatagatcatggcgccctctccataaccccaccacccacttctccccattgccattaattgcacattcccacaacgatgatgataaatgaggaacattgttaacaataataataataatattcattcttcagcagggagaatggtgctcaacatggtttctgagaacgcggttatagtgattgggagaagaggctgttgcatgagccatgt

SEQ ID NO: 9448 - DNA, 192 bp, Glycine max
  Clone ID: 701102502H1
tcggctcgagtctctctctctgtctcctacgattcgttttgccccttgtgttgccctaatttcaaccatgcctcgccgtagctccggtggaagatctgcccgttctgctcctcgggcagctcctcgtcctgctccagttcaccatgctcctcctccagcccctgctcagagtggtggtggatctatgcttgg

SEQ ID NO: 9449 - DNA, 182 bp, Glycine max
  Clone ID: 701102503H1
ccgagttcatccatccaacggtccttcctctcctgtgatgaagccctcatcttttgggtttgactcatcagctgctgtggcaactgcaatgatgaattccaggtccgccgcgtttgcaaagcgaagccaaagtttcatcgatcgtggagctgctgcaacccaccaccatcttggggggatgt

SEQ ID NO: 9450 - DNA, 180 bp, Glycine max
  Clone ID: 701102504H1
gcaattgcaataaaccaacgtttaatagtggctgtctcgtttgcttggtcttatgtgtctctcatagttgtcgctcttttgctttctcgtattgttctctcatagtgtctctcttgttcttcaatcaagagaagatagaatacaccctgaagccatggaaggtggtgtgctagaagctga

SEQ ID NO: 9451 - DNA, 174 bp, Glycine max
  Clone ID: 701102505H1
ctggtccttgatgatgatgggaatctcaggatctatagcttctaccctgaacagaaaaaccaatgggttgaggtttggaaagggatatgggagatgtgcagaatcaaaggcaaatgtgggcctaatgcaatttgtgtgcccaaagaggatttgagcacttccacttatggggtt

SEQ ID NO: 9452 - DNA, 180 bp, Glycine max
  Clone ID: 701102506H1
ggtaaatgggacctacccgcccgaagttgaagcctttcgccagaagattctcgcagctgatagcatcctctttgcctcccctgagtacaattactctgtcgcaagtccattaaagaatgcacttgactgggcatcaagggcaccaaatctttggtctgctaagcccgctgccatagtgag

SEQ ID NO: 9453 - DNA, 178 bp, Glycine max
  Clone ID: 701102507H1
ccgtgttcccactgtggatgtctctgttgttgacctcacagtgaggctggagaaggaagcctcctacgatgaaattaaaaatgctatcaaggaggaatcagagggcaagttgaagggaattcttggttacactgaagatgatgtggtctccaccgactttgtgggcgatacagatcaa

SEQ ID NO: 9454 - DNA, 177 bp, Glycine max
  Clone ID: 701102508H1
ctcgagccgttcattttgttgttcgaagccaaaaccctagcagccggcgagaatggcagacgttgaggttgatgcggcggcagccgcaggggcagcgcaccgaagaagagaacgttcaagaaattcagcttcaggggcgtggatctggacgcgcttctggacatgtccaccgacgaa

SEQ ID NO: 9455 - DNA, 177 bp, Glycine max
  Clone ID: 701102509H1
tgaacactgaatgatttgtatggtgaaggaggttcaaggaagaaacaacagctcacttacttcctttaaattgtggaatgctacttttatttttggatttgtgaccattcatcctcaatgatacatacctttaacaaaggaaggattccttcatcagagatgttgaactcaaagcat

SEQ ID NO: 9456 - DNA, 175 bp, Glycine max
  Clone ID: 701102510H1
ggaagtggcaagtttaagactgtggctgaggctgtagcatccgcacctgacaacggtaagacaaggtatgttatttacgtgaaaaagggaacttataaagaaaatgttgaaatcggcaagaagaagaccaacgtgatgcttgtaggagatggtaaggatgcaactgtaatcaccg

SEQ ID NO: 9457 - DNA, 174 bp, Glycine max
  Clone ID: 701102511H1
cagcaacgatggtgcagaggctcacttatcgcaagcgccatagctatgctaccaaatccaaccagcaccgggttgttaagacccctggtgggaagttggtgtaccagaccactaagaagagagcaagtggacctaagtgccctgtcactggcaagaggatccaagggattccac

SEQ ID NO: 9458 - DNA, 175 bp, Glycine max
  Clone ID: 701102512H1
gttggtggggatgatcctcctcttccaagttacccccaagcagagattgagaatggtggcacacacaaaacaagtgaacacagttcaagcagctcctagtagtgaatctggctcttcatccagtgattcagatagtgagtcagatagtgaaccaggcattgctaaagcatcagac

SEQ ID NO: 9459 - DNA, 174 bp, Glycine max
  Clone ID: 701102513H1
attgcgtacagttatccagaaacaaaaaccgtagagaatccgaatcccttatcaagcaggggtttcgcggcccgagaccaagtcaaaccgagacggtgacactggctgagtggaatttccgccgccattcgaagctacagcgatggccatagccgccaccatttccgttcctct

SEQ ID NO: 9460 - DNA, 175 bp, Glycine max
  Clone ID: 701102514H1
tttcaatttccctaggggcttaatatctccccgcatttgtgcctagcctcattattatcatagtagatattcattccccttatctttctctcttctctctccccgcccaaaccctaactccctaccctattccgctttctctcatccatcatgaaaggaggaaagtccaagaccg

SEQ ID NO: 9461 - DNA, 173 bp, Glycine max
  Clone ID: 701102515H1
cgggttgattgacccagaaggaatcgaaacactttgtgctgatatggaggtggatcatacagatgtgagggttttgatgcttgcatggaaaatgaaagctgaggagcaaggatattttaccttggatgagtggaggagaggcttaaaagcattaagggccgatacagtaagta

SEQ ID NO: 9462 - DNA, 178 bp, Glycine max
  Clone ID: 701102516H1
gtttggaggatccagggatctcttgctgtgtctaggggaattggagatagacacctgaaacaatgggtgacagcagagcctgagaccaaagttctcagaattgaacctgaacatgacttgttaatcttagcttcagatggattatgggataaggttagtaatcaggaagcagtagata

SEQ ID NO: 9463 - DNA, 178 bp, Glycine max
  Clone ID: 701102518H1
gtcgcgttgtgttgcgtcgtgtcgtgcgctgttcctctgtctgtcgtttttgttttcagaccaaaccctagctccgcatcgcaaccatgtcgaccaagcaaggtggaaaagctaagcctttgaagaaacccaagtctgataagaaggattacgacgaggttgacatggctaacattca

SEQ ID NO: 9464 - DNA, 177 bp, Glycine max
  Clone ID: 701102519H1
ctcgagccgctttgagaagtccaatgtggtatctccatttgcaatgcatcaacagcagctggccatgctggcacagcaacagtctcttctaatggctgccgctaaatctgctggtggggatcccaagtacctggccagcttacaacaacaacagtctcttctaatggctgctgctgc

SEQ ID NO: 9465 - DNA, 176 bp, Glycine max
  Clone ID: 701102520H1
gaagaagagaaagaagcatgaaagcacagatagcctggtcagcatgcatgatgtcatggatgctcagtgggtttatgataattatagggatgagacttatttgaggagggttgttatgcccttggagattctcttgactagctataagaggcttgttgttaaggactctgctgtca

SEQ ID NO: 9466 - DNA, 52 bp, Glycine max
  Clone ID: 701102521H1
gcggactttgaatgtgattgttgtctttttaaatgaattaatgtatatatat

SEQ ID NO: 9467 - DNA, 175 bp, Glycine max
  Clone ID: 701102522H1
gaaagaagtggagtccaacactattgatatgatgatagaagaggacttctctagagagcaatgcaggtggaagaaaaatgctgagcacacaagtgagctagctgtggaacttgaacttgctatcttttgctttctagtggaggagctttcagaggaactagtgtgttaatgtggg

SEQ ID NO: 9468 - DNA, 176 bp, Glycine max
  Clone ID: 701102523H1
caaatcctctgagagaaaaaaaaattagggttttgcatttcgggtcagacagactcagacatgggaggaggcaatgcccagaagtcaaagatggctcgcgagaagaacctcgagaagcagagggctgccgctaagggaagccagttggattcaaacaagaaagccatgtctattca

SEQ ID NO: 9469 - DNA, 175 bp, Glycine max
  Clone ID: 701102524H1
ctgagaaagagatggcaattgggttcatggaggtgcagcttgtgaaagcaaaggagttgtgtgacactgatttctttggtagtatggacccgtatgttgtgatacaatacaacggccaagagcaaaggagtagtgttgctaagggacagggcaataatccggtatggaatgagaa

SEQ ID NO: 9470 - DNA, 171 bp, Glycine max
  Clone ID: 701102525H1
aattcttacaatttattatctttctctaagaactcttccaattttttctctctcttcctctttagcttcatcgccatggcatcaccagcaagaaccttctttgccttcattctcgccgtcgtcgctctcttcttcgccgccgccaatgctcaagacctctccccggctccg

SEQ ID NO: 9471 - DNA, 169 bp, Glycine max
  Clone ID: 701102526H1
cttcgcctttctctctcttctttttactctctctctgtctctctctacgctttctcgttcgagatccctcaagggatccactaactgaaggagaaatggggttgacattcaccaagcttttcagccggcttttcgccaagaaggaaatgcgaattctgatggtgggtct

SEQ ID NO: 9472 - DNA, 169 bp, Glycine max
  Clone ID: 701102527H1
cccttctttcataaatatgcgtctctgcgacatgttcaccaccacctccttgttcacatcatcatcatcatcatcatcatcatcttcttcttcttcaatcagttgactcttcgttcctccctctattcatctgatggagcccatggacatcgttgggaaggccaaggaa

SEQ ID NO: 9473 - DNA, 169 bp, Glycine max
  Clone ID: 701102528H1
gggatttgttataataccatcaaacagaagtacaaaagcgatgtgcagctgattccattgtgaagaagagagcagaaagaaataagctttataataatgtatcccaaccaagccttttcttcaggttcttatgcggagatgatgtctgggacttctctgttacctcatg

SEQ ID NO: 9474 - DNA, 169 bp, Glycine max
  Clone ID: 701102529H1
cgtcgattcccctaaacatgttcgacatttaatcacagtctctaagcacacattaataccatcggagaaggaccttccatctaccaacaacacgtagtattatttcattgatttctccctcttcgctctctctcagtgaccagagacagatgatgatggagatggcgaa

SEQ ID NO: 9475 - DNA, 170 bp, Glycine max
  Clone ID: 701102530H1
ggcgaatcatgggtccatgtgagataaatctgacaattgcaatttaatactggaaaccacttggccccatcacagatcatgcgatctcattgctaatctggatgttgatatatatgaagcattaaagctgcatagtttggcggtttgctgttctggtatacctaacagcc

SEQ ID NO: 9476 - DNA, 166 bp, Glycine max
  Clone ID: 701102531H1
ggacttttgatgtctctcttctcaccatcgaggagggtattttcgaggtgaaggccactgctggtgatactcacttgggaggtgaagattttgataacagaatggtgaaccattttgttcaggaattcaagaggaagaacaagaaggatattagtggaaatgccag

SEQ ID NO: 9477 - DNA, 174 bp, Glycine max
  Clone ID: 701102532H1
ctcgagccgttttgctccatctctgtatatcatcacaacttccaaaggcttacttactctaatatatctctgattcaagtggttctgtgagttttcttgttttagtctgaggctttgagttttgtttaatagatatgccaagggcaaattgcagtttctgatttgttgaaactg

SEQ ID NO: 9478 - DNA, 174 bp, Glycine max
  Clone ID: 701102534H1
ctctacagtgcaattgatggcagcaaagggttctataaatgccctgttgagaagtctgtgagatctttgatgaatgtgcctttcactttggagaaatcagagctggagggtgagtttatcaaggaggctgctaaagagaagatggtgcagctcaagggacatagatcagtggga

SEQ ID NO: 9479 - DNA, 173 bp, Glycine max
  Clone ID: 701102535H1
caatcttgcaattgtggtaccacagatggtggtgtctgcattaagtggtccttgggattccttgtttggtggtggcaacttgccggctttcatggtgggtgctgcggcagccgcgttgagcgccataatggcgattgtcttgctgccaactccaaagccagctgatgaggcca

SEQ ID NO: 9480 - DNA, 172 bp, Glycine max
  Clone ID: 701102537H1
cggctcgaggttgtaggctaggtcctattgttagtgaaggacagtataaaaaagtgttgaattgtatctcaactgctaagagtgagggtgcaacaattttgattggagggtctcgcccagagcatttgaaaaaggggtactttgttgaaccaaccatcataactgatgtgac

SEQ ID NO: 9481 - DNA, 172 bp, Glycine max
  Clone ID: 701102538H1
acttgatctgcctttgctttgttatttcattaacagcacccctttgggccatatattggttacctcaactgcttttctgttcatctttccagaattattgtaaagttccctttttttgttctgtcttttcattcttttttcaaagtgaattcctgggattttttgttttcaa

SEQ ID NO: 9482 - DNA, 170 bp, Glycine max
  Clone ID: 701102539H1
cttccgatcatgaccatgatcatgatcatgttaacattcccgtcattgacctgaaacatgttttctcggaggatccgatcctccgagaacaagtgtttgggcaggtggaccaggcatgtcgggagtgggggttcttccaggtggtgaaccatggtgttagccatgagttg

SEQ ID NO: 9483 - DNA, 170 bp, Glycine max
  Clone ID: 701102541H1
ctccgatcaccccctcggatccggtatcggcttcaaagaaaccgactctcccaatttcaccggttctttttactccaagaccaaggcaatggtagaggatctgctgaagaactatgataatgtgtgcacattgcgagtgaggatgcctatctcatccgatttattgaacc

SEQ ID NO: 9484 - DNA, 167 bp, Glycine max
  Clone ID: 701102542H1
caatatattccattctctctgtgtatttccctacctctcccttcaagatgcagatcttcgtcaagaccctcaccggcaagaccatcacccttgaggtggaaagctctgacaccatcgacaacgtcaaggccaagatccaggacaaggaaggaatccccccggaccag

SEQ ID NO: 9485 - DNA, 167 bp, Glycine max
  Clone ID: 701102543H1
caaatccgcagcaactattgagggattggcagcgcaggcttcgccaagagtgtcgcaacattgagcgccaaattcgcgatatacagagagaagaaaaaaatgtgcagaaggctattagagaagctgcaaagaggaatgacatgggctctgcaaaggcacttgccaag

SEQ ID NO: 9486 - DNA, 166 bp, Glycine max
  Clone ID: 701102544H1
ctaggttaaaaaagctacagatttctttttgctgattttggaaaattttcgtgtgattagcatcttgcagtagtgattgctggtcctcgtatcaatgtacacagactactgccatctctagatttcaggtgcagggtttttgattctatgtgcttctacaattttc

SEQ ID NO: 9487 - DNA, 167 bp, Glycine max
  Clone ID: 701102545H1
gtgatccgtgcgcagcgtaagggagcaggctcggtcttcaagtcccacacgcaccaccgcaagggccctgcccgcttccggagcctggatttcggagagcgcaacggctacctgaagggtgtcgtcactgacgtcatccacgatcctggccgtggcgcgcctctcgc

SEQ ID NO: 9488 - DNA, 167 bp, Glycine max
  Clone ID: 701102546H1
aatttgcactgagggcattggctagcacacttaatgaagaagagttggctgatataaaagatcaatttgatgctatagatgtagacaaaaatggttcgattagcctggaagagatgagacaggctcttgccaaagatcttccttggaaattgaaagaatcacgtgta

SEQ ID NO: 9489 - DNA, 168 bp, Glycine max
  Clone ID: 701102547H1
gtaccttggagaagaaactttgtatagcaaaaatgataaaaaccaatagctcccaagattggcctgagccaataatccgtgttcagtccttatccgaaaggtgcacagattcaatccctgagaggtatatcaaacccctcagtgagcgtccatctgatgatgttgttg

SEQ ID NO: 9490 - DNA, 172 bp, Glycine max
  Clone ID: 701102549H1
tttacatttcagcgcgcatcactttctctctccgaaatgaagcagtctcttctgctgagacgcgaaagcagtgaccagagttaccagtcgcggggaatattccggcgctccgatgctatcgcctacggctccaactacgagaaagccgctgcgttcatcgatctggctgaag

SEQ ID NO: 9491 - DNA, 171 bp, Glycine max
  Clone ID: 701102550H1
ctcatatttttcgaccttttgttggctacaaagaagtcagacttgttagcaaggaatcgagacaacctgggggtgatccactagtactttgttttgtcgattttttgagtcctgctcatgcagcaactgccatggaagcattgcagggttacaaatttgatgagcttgacc

SEQ ID NO: 9492 - DNA, 170 bp, Glycine max
  Clone ID: 701102551H1
ttctctctcttccctcttcaatcttcacattttctctatggagaatcatggcaacaagcgagtctgggaccagtcctctgactccaacactcagcgggtcgactcgcccgagtctaagattcgtcgagttgactcgtccgattcgggtattaactcgtccgagtctcaac

SEQ ID NO: 9493 - DNA, 168 bp, Glycine max
  Clone ID: 701102552H1
ggaaaaaataatggctgaagctactgctgcttattctcttcccatatcattaagtcatcagtttacttctcgcaatgatcctccaacattctccatggatgactttgaagctcttggaaattcaaccatatcatcaagtcctcccttagctggggagagaaaatcgtt

SEQ ID NO: 9494 - DNA, 134 bp, Glycine max
  Clone ID: 701102553H1
tggcagaggtgcatcaccggaagaagacgcaggcaggtggcgcagtacgtggagagaggacgctatataaatagatgttgtccccgatgctctcgatgtcaggcactcgtatatgcttcctccgcacaacatac

SEQ ID NO: 9495 - DNA, 168 bp, Glycine max
  Clone ID: 701102554H1
cattaagagcgtagaaaccattgaaggagatggagggccaggaaccattaagaagcttactcttgctgaaggtttaggttatgtgaagcaccacgtagatgcaattgacacagaaaactatgtgtacaactatagtgtgattgaaggcagtgcattgtcggagccatt

SEQ ID NO: 9496 - DNA, 169 bp, Glycine max
  Clone ID: 701102555H1
atttttcgcgtcacataaacaaaaaaaaataaactggggagaagcatgttgttgatgttgggactatgcttcctattgttctctgcatttccacttgcgttctctgagagatgccacccacaagacaagaaagcgttgctccaactccagaaggacctcggcaaccctt

SEQ ID NO: 9497 - DNA, 168 bp, Glycine max
  Clone ID: 701102556H1
cttgtatgctttagtttctagcatcgatcactcctaattacttgctgcatttctctactccttgtgcttgacacttttgtcatttaaaatggaacttaattttaagtaccaacttagccttttctgtgtcacactgctcttacctgccctgtgtacctctcaagactc

SEQ ID NO: 9498 - DNA, 163 bp, Glycine max
  Clone ID: 701102557H1
atcactggtttcacacttgcgactttcagtactcctattatcagtttcattgggaaattcagcttcactccaagaaaattttgtccaatgtctcaacttgaattcggacagaacattcccatttaacccactaatttacacaccaaaaagtccttcattcacc

SEQ ID NO: 9499 - DNA, 163 bp, Glycine max
  Clone ID: 701102558H1
caagagtggtttttacagttgatcctgaggataaacatacagaaatgtcttcagctgtcatcagtttgataagagcatcatttacaaccctggttatacgcccatcaattcttcaccttacttcttcatccttgtttggagatccctactcttttgaagtgct

SEQ ID NO: 9500 - DNA, 163 bp, Glycine max
  Clone ID: 701102560H1
atactttgatattcaatgcatttgttctctgtcaaatctttaatgaatttaatgctcgaaagccagatgaattcaacatattcaaaggagtcacaagaaactacctctttatgggtatcattggattaactgttgtgcttcagattgtcatcattttatttct

SEQ ID NO: 9501 - DNA, 163 bp, Glycine max
  Clone ID: 701102561H1
tgctgtttgttttcccaggttttagagctccaaaccttcagatccacctcattcgtctccagatcttccttcctggataacgttttcgggttcgagaaggcacttgtgttgtttttcgtacgaaatggagactaaacagagttcggtgacggttacgctcagt

SEQ ID NO: 9502 - DNA, 162 bp, Glycine max
  Clone ID: 701102562H1
gcaaaacctcaactgtgttggatgtccaaatattaggaaggttgtcattccattgagggcaaattgttttcatttgttatttttaaacctttcactctcggcaaatttgaaagaggttgatgttacttgtctcaacctatgctttcttaatttaagcaattg

SEQ ID NO: 9503 - DNA, 166 bp, Glycine max
  Clone ID: 701102563H1
cgcaagcctctcattgtaatgtcccctaagaacctgcttcgtagcaaggcttgcagatcaaatttatctgagtttgatgatgtccaaggccacccaggctttgacaaacagggaaccagattcaagcgcctcataaaagatcaaaatgagcacaaagatgttgagg

SEQ ID NO: 9504 - DNA, 170 bp, Glycine max
  Clone ID: 701102565H1
gtgactggcaatctaagcaattgtgtgatgtcaaaacgtgatgtttgtgaagatggctaagctttgagcatctttggaatagtttactgctttctggtcacgtaagcacctgtttttagaatatacttggtagcattggttgtatgcaaaaagagttacaataaatggag

SEQ ID NO: 9505 - DNA, 169 bp, Glycine max
  Clone ID: 701102566H1
cacaaggactctagagctacaaatcctagcccaaattccaaaaccgaattcggttccattaaggtcgaacaggagattcaacgaatggggaaccatggcagcagcagcagcaacaacaacaataacaaaggtgttggaaggcatttcgttggtagtggtgggcaatgga

SEQ ID NO: 9506 - DNA, 167 bp, Glycine max
  Clone ID: 701102567H1
gtgcgagctgaattcaactcaagtatcaatgctaatactgttcttgtgcagaaccctctgccatcatttacatctcgtgttacttttgagttagaacctggagcagttggacacaccactgattttaaggaagcaaataaaagactggaatggggtctgaaaaaggt

SEQ ID NO: 9507 - DNA, 167 bp, Glycine max
  Clone ID: 701102568H1
ctcgagccgaccactaccacctttccgccttcagccgtttcaaccaccagcaaatggctgggcttcgtggcggccgtgtggattcaatgcatctccggcaacaactacactttctcaaactactccgacgccctcaaatccctcatgcacctcactcagctccaact

SEQ ID NO: 9508 - DNA, 165 bp, Glycine max
  Clone ID: 701102569H1
ctccctttaattgcatatatctgagaatcactcttttattgattcaaactttggaaatctcaatcttcacccttatgattgaaattaacatgaagcatcaaggcaagcttagagtgtttcttccaaatatgataatacttgtaaccatccttctccattcaacaa

SEQ ID NO: 9509 - DNA, 162 bp, Glycine max
  Clone ID: 701102571H1
gaacgaacggatccgaaaggcgctgagagaattttttgacctgacgggggcgttcaatgtgtctgatgctcttccttatttgagatggttggatttggatggtgcagagaagaaaatgaaaaagacggcgaaagagttagatgggtttgttcaagtttggct

SEQ ID NO: 9510 - DNA, 166 bp, Glycine max
  Clone ID: 701102572H1
atactactaactgtgttgtaatacctcagtggagaacaagatgaatccatggaacatgagaacttccaagttactctctcaacaacttgcttatcctccttatcgcttggtagaagagattccaaacatggtaaattccagttgtgtgagcaaggagccaagaggt

SEQ ID NO: 9511 - DNA, 163 bp, Glycine max
  Clone ID: 701102573H1
gtacacctccccagcttccatttaaggtatatatagcttataagtgaacttcatatacatcttctttatattaattttcgctcttgtttcttttttcccccatctgtagtttgtggggctagaagtttctatttctgggcattcagaagattgcaggaaaagt

SEQ ID NO: 9512 - DNA, 160 bp, Glycine max
  Clone ID: 701102574H1
gttgagaggaggcactgtggcagaagtcctaggagtgtaaaacagagacgcaaaatgaagacgatcttgtcgtctgagaccatgaatattcccgacggcgtgagcatcaaggttcacgctaaggttatcgaggttgagggccctcgtggaaaactcgtgc

SEQ ID NO: 9513 - DNA, 161 bp, Glycine max
  Clone ID: 701102575H1
ttccaaaaattcttaaggatggccacagcagaagaaatttcaactttgaaactgttgcgccaatatctcttgggggatatttcagacccttttctcaccaatctcattccagtaaaacttgaagacccctcatcaggacttgatatgggttcaaacttctc

SEQ ID NO: 9514 - DNA, 160 bp, Glycine max
  Clone ID: 701102576H1
cgcatataacaataagaatttcttacagaccgggttaattgttggtggttgggataaatatgaaggtggacaaatttatggagttcctctgggtggaacaatagtacagcaaccttttgctatcggaggatctgggtccagttacttgtatggtttcttt

SEQ ID NO: 9515 - DNA, 161 bp, Glycine max
  Clone ID: 701102577H1
caagatgatggcaatcttgtgttacttgatctccaaggaaccattttgtggcaaagttttgataccccaactgatactctccttcccggtcaattacttaccagatacacacaactagtgtcttcaagaagccagactaaccattctcctggtttctataa

SEQ ID NO: 9516 - DNA, 161 bp, Glycine max
  Clone ID: 701102578H1
gtggtggcggaggcggtggcgaagagtggaaacaacaactggcattattgttgctgtatgtcagtggaatattacagtgggatttactacgccgagttcgctaaccctctccaatggccacaactcaggaaaaaacgacgccatgttgcgcccctcaaaat

SEQ ID NO: 9517 - DNA, 154 bp, Glycine max
  Clone ID: 701102579H1
agttgctagatcttcttcacgttgccaatgcggtgggtagttaattagtagatatgggtttgagatttgagaacaattatgtgttactagagctagagtctccaatccttttattattattattattattattttcttttatctcattcccgtt

SEQ ID NO: 9518 - DNA, 165 bp, Glycine max
  Clone ID: 701102580H1
ctcgagccgaaacgcagcagcagctgcaggccacggcggcaccattctcgacctccactcctactcctcctcctccttcctccggcggctccgcgtccgaggcaccgccgaagcaggtggctcaagcaatggacaagctcggacaagccgaacgaatcatcgccg

SEQ ID NO: 9519 - DNA, 163 bp, Glycine max
  Clone ID: 701102582H1
caatcacaattgaatttctgggattctcacctccatcaacaaaccctaagcacataacatcgtcgctcacctgcaccatagagtttcttccgtatatgctccacttcaccatctcgctctgcagcaccagatcaatgatcggcacgttgggccccacttggga

SEQ ID NO: 9520 - DNA, 162 bp, Glycine max
  Clone ID: 701102583H1
gtgaagttgcagtcaattgtgatgccgctttctgagtttgatcatgcagataagggagatgcgctgcacgcaatggaactcgctctctcattagagaagctaacgaacgaaaagctccttaacttgcacagtgttgccacaaaaaatggtgacgtgcagttg

SEQ ID NO: 9521 - DNA, 159 bp, Glycine max
  Clone ID: 701102584H1
ccaaagtggggcataaaatggataggcctacaaatgcttagtgttgcatgctttgtaattactagattagctgcagcaggttccattgctggggttattgatgatctttaagtttacaagccatttgttaccagctactaattcaataggataattact

SEQ ID NO: 9522 - DNA, 165 bp, Glycine max
  Clone ID: 701102585H1
cctcgagccgattcggctcgagctcagtggcggtggctatgtcaaacacagaactaagatcccgctggcggttggcgcaacctaccgatcttcatccaacggggcaacgttggatctgctgaactgaacttctttttatatgcactctgtgatttcactctgctt

SEQ ID NO: 9523 - DNA, 163 bp, Glycine max
  Clone ID: 701102587H1
tttttaaattaagtataatatattatcagatatcgagagagagataggattcatcgtattgttatcatcccttgcaatccatgtttctgtttctaccaccaaagcatgaagttctgcaagacctaccagcagtacatgcaaggacatggccacaacaagctcc

SEQ ID NO: 9524 - DNA, 163 bp, Glycine max
  Clone ID: 701102588H1
gtttctgaggaaaccaccactggagttaagaggctctatcagatgcaggcgaatgggactcttctcttccctgctattaatgtcaatgactctgtcaccaagagcaagtttgacaacttgtatgggtgccgtcactctctccctgatggtctcatgagggcta

SEQ ID NO: 9525 - DNA, 160 bp, Glycine max
  Clone ID: 701102589H1
ctctctctcaccaaagccttcctagaacgaaaaaaaaaagaagagcaattttccctcaccaaagaagaagaagcaaacaatggccgatcaacttaccgatgaacagatctccgagttcaaggaagccttcagcttgttcgacaaggacggcgatggttgc

SEQ ID NO: 9526 - DNA, 156 bp, Glycine max
  Clone ID: 701102590H1
ggtgaaagtatgatggataaagaagagattgttagcagtgaaagtgagcaggaagaggaggacgaggatgaggaggatgcagggaagaacagaaagcctgatgccaaaagcaagggttggttttcatccatgttccagagtattgcagggaaggca

SEQ ID NO: 9527 - DNA, 159 bp, Glycine max
  Clone ID: 701102592H1
ggagagtctagagagagaaagcaaagcccaaacaccccttttcaccattgcaatcttcgttcggtttcagagaaccccttttgaatttgtttgaattttctgggaaactgggcattttgtgatcatcatctgggttctctcgatctccatctttttttt

SEQ ID NO: 9528 - DNA, 158 bp, Glycine max
  Clone ID: 701102593H1
aagaaattcgccatgggttatgatgaacttatgcctctcagccagcatggaattgatggattaggtgggttgggggctacagtggtggatgctctcgatacggctatgatcatgggtcttgatgaggttgtggctgaagctggatcctgggttgaaga

SEQ ID NO: 9529 - DNA, 160 bp, Glycine max
  Clone ID: 701102594H1
cacaatttcaacgccacaccaaaaattccactgcaccaccaccctccccatttgtacttttcttctcattctctttccactcccctgcattctgcacacaatctagctttacgtgcttctgggcaaccgcataaggttaaactgttaagcatatcattga

SEQ ID NO: 9530 - DNA, 161 bp, Glycine max
  Clone ID: 701102595H1
gaaagctcgacatgtcagggaaaggcgcaaagggtttgataactgctaaggacaaagataagaaaaaaccaatttctcgctcctcaagagccggtcttcagtttcctgttggacgcattcatcgtcttctgaagtcaagggtgacagcacatggaagagtt

SEQ ID NO: 9531 - DNA, 128 bp, Glycine max
  Clone ID: 701102596H1
tctgtctgtagctgtcggaagtttgaaacatacatattcttcttaattttgggtcagtagtatgtggaagttgaagatagcagaaggaggagatgggttaatctctgtgaacaatttcattggacgtc

SEQ ID NO: 9532 - DNA, 211 bp, Glycine max
  Clone ID: 701102601H1
cgagattgcaaaattctcttccgtttcaggattagcgtttcaccgttacagtgaaacatggcaaaaccaaagcgaatctctctgcgtatctttgcgctgctcctcttgatttccacctcttcgtttcagcttctccgcgcttccgatgacgccgatgatgatgcgatcttctatgattcgttcgacgaggattttgaagaccgttgggttg

SEQ ID NO: 9533 - DNA, 198 bp, Glycine max
  Clone ID: 701102602H1
actctcattccccattccctcagctacttcagcccctactcgattcggatgttccgcgatgaacgctcactcggaggtcacgacgacgtccagaacaatctcgggcgcgtcgctgagcgcaaacacgtctacgccgttatcgacggcgtgtcgtcgatttgtactcgtacggtttcatcgacatttccgcggcgtttg

SEQ ID NO: 9534 - DNA, 212 bp, Glycine max
  Clone ID: 701102603H1
ctttgcatctcataacagagagctgagaaaggaagaaaaaagcgtgtgtcagagatacttaacaatggttgtagaagatacccaaaagtcagtcatcacggaggaccaataccctagcagggtcgtcagcgacaacaacaacgacgacgacgacgatgatctcgaagagggtgagatccccgtcgacggcgaagatagcggcgccaccgcca

SEQ ID NO: 9535 - DNA, 208 bp, Glycine max
  Clone ID: 701102604H1
atgtgtacttcgcattagaagggacataacagaggatcaacgccaagcttttctcgtagttgctgctcttattgcaaccgcaacttatcaatcagcactaagtccccctggtggagtttttcaggctaatgctggaaacaacgataataataatgttaatatcacttcccccaattctacgactattgctacgcaaggacttaatgct

SEQ ID NO: 9536 - DNA, 207 bp, Glycine max
  Clone ID: 701102605H1
atttggtgaagcattggataagacccagaccgtcatttggaatggaccaatgggtgtttttgagtttgataagtttgccacaggaacagaggccatagccaagaaactggcagagctgagtgggaagggagtaacgaccatcattggaggaggtgactctgttgccgctgtggagaaggttggtcttgcagacaagatgagccacat

SEQ ID NO: 9537 - DNA, 208 bp, Glycine max
  Clone ID: 701102606H1
gcttcatggagtgggagttttaatgattcatttacccctcaaaaaatgggcaatattaagcctttaggggaagctttgggcatgcccccgtcaagattttcgcctgatgaatctttaatgcataaacctgtgaaaagtagcagttatggagaagatcttcacgaggttgaattttgagcagatgctcaagctgtaaatatcaaatttt

SEQ ID NO: 9538 - DNA, 206 bp, Glycine max
  Clone ID: 701102607H1
ccattttccatttcttctgtgtcttaaaaacctttctttcttgtcttcgtcttttctccctcttctctgcttcaccgcttgccaattcgctcttgacatggcctctcatacgctaaaaaatatcctcattattggagctgctggattcatcgcatctcatgttgcgaatcggcttatccggaattatccccagtacaaaattgttg

SEQ ID NO: 9539 - DNA, 204 bp, Glycine max
  Clone ID: 701102608H1
aaaaagatcacttttaaaattacagagactaaaagagaattaaaatataaattataagaattaaaaaggttatttttaaattatagaaactaaacaaataaaaattatgaaattatcagaattaaatgaataattttacatttttttttgggtagttttgaatttaccttgggatgtggatataagggaaaccgcgagagagaa

SEQ ID NO: 9540 - DNA, 210 bp, Glycine max
  Clone ID: 701102609H1
aatccctcatgagcctaacccaaatcgagctcaacaatctgtccgtggccaaggatgttggcaaggcttttgggcttctggctgggctggcctcagacaaattcccgacttgggccattctcctcattgggtccctccaaggccttatcggctatggcgtccagtggctcgtcgtcagccagagaatccaacccctcccatactggcaga

SEQ ID NO: 9541 - DNA, 210 bp, Glycine max
  Clone ID: 701102610H1
gaaatatgggatgctattaagtcatgggtccaagagtatgtttccttgtattacccaacagatttggcaattcaacaagatactgaactccaagcatggtggaaggaagttgttgagaagggtcatggtgacttaaaagacaagccttggtggcctaaaatgcagactcgtcaagagcttattcaatcatgttctactatcatatggatt

SEQ ID NO: 9542 - DNA, 207 bp, Glycine max
  Clone ID: 701102611H1
aaaaattacccaattgagactaccaggcttgaatttggcaggacaactgtcttcggcaattcagtctttatccgaactagatactttggatctttcttacaacacaggcttgacaggaacaattccacaagacattgggaatatgaaaaagctaaaatccctatcattggttggttgtggtttctctggtcctattccggattcaat

SEQ ID NO: 9543 - DNA, 210 bp, Glycine max
  Clone ID: 701102612H1
gaaaaaccaagtaatactagccaaaatatgtctcccaaatacatgtcccttttcctcctagtaatactagggatggcttttctggccactacttcccttgctgatcgtcgttttctttcggtggaagatggtcatgatcaccatcaccaccaccccccaaaaaaacactggcctccaaccacacaaaatgaaccttcaaacgtagaaaac

SEQ ID NO: 9544 - DNA, 208 bp, Glycine max
  Clone ID: 701102613H1
ctctctttgaaaactgtcacgctttcaccggcgtcggaaacatcgtccggttagggttccggctatcgctaagggcacggatcataaaatcttccagaagcttctatgctattactcagtattattaccatttgccaaggtgttgttaggcaccatttttatcacttgaagtcagtcagcaacatattttctgcgaatttttcaggaa

SEQ ID NO: 9545 - DNA, 213 bp, Glycine max
  Clone ID: 701102614H1
ctgctagctgtgacttgttttgagttcaatcaaatcgcattggtctctgaaatcaggaaagatggttagcgtagtgacgatcaggcaggcacaaagggcagaaggcccagcaaccatccttgccattggaactgcaaacccaccaaaccgtgttgatcagagcacctatcctgattactacttcagaatcaccaacagtgaccacatgaccga

SEQ ID NO: 9546 - DNA, 214 bp, Glycine max
  Clone ID: 701102615H1
ctcttggactttcctctcactcagatcctggtggcatgaccattcttctccctgatgaaaatgtggcaggacttcaagtacgcagaggagaagattgggtcactgttaagccagtcccaaatgctttcatcatcaacatgggtgaccaaattcaggtgctgagcaatgcaacttacaagagtatagagcacagggtgatcgtgaactcagacaa

SEQ ID NO: 9547 - DNA, 215 bp, Glycine max
  Clone ID: 701102616H1
tctgcactcagggctgtgattaaatgcattgaagaatacaaacttgaggatgagttccctccagaaaatctgaagaagcgacttgaccagttagagaaggtgaagaccgagaaaaggaaaccagtggcagttcctgccaataagagaactagagcaagcaacggcaatggaggtccaatgccaccagccaaagctgggcgtttgactaatgcgta

SEQ ID NO: 9548 - DNA, 210 bp, Glycine max
  Clone ID: 701102618H1
gaaggaaggaacaaagcctgcgggaatgatctaacaattcctcttttggtgaacaaaattctcagagtttcaccactgaccacagactattctgtttctgccatttggaagctgtgcaagtttggagaaaaagatgaagggagaacccttgttgaggcccttcaagttggtgcctttcagaagctcttgttggtgttgcaagttggatgt

SEQ ID NO: 9549 - DNA, 209 bp, Glycine max
  Clone ID: 701102619H1
gagagagagagagagagagagagagagatatggcttgcaggcaattgtgggcttcaagagctgtctcttacctgaggctctctgtgtttcacagaggcttttctaatgttgttaaagatttgaagtatgctgattctcatgagtgggctgaagttgatgaaaattctgcaaccgtcggcataactgatcatgcccaagatcatttaggt

SEQ ID NO: 9550 - DNA, 209 bp, Glycine max
  Clone ID: 701102620H1
gtgatttggagtttggagcgactgaactaatcattaatttgcactcgctgtttcagcttcatcacccttcttttgcatcatttatatctcttgagaaatggcacaagaaacctttctattcacatctgaatctgtaaacgacggtcaccccgacatgctgtgcgaccagatctctgatgcagtacttgatgcgtgccttgaacaggacc

SEQ ID NO: 9551 - DNA, 208 bp, Glycine max
  Clone ID: 701102621H1
ccaccacacaattcctacacatttctactctttagtttctccaattttctttctcaattctcaacaatggccactacaacacaacttcacttaccccctggattcagattccatccaacagatgaactactcgtcatccactacctttgtcgcaaatgcgcttcgcaacatatcgcggttcccataatcgccgaaattgatctgtaca

SEQ ID NO: 9552 - DNA, 143 bp, Glycine max
  Clone ID: 701102623H1
ctcaaagatataataatatatagatatagctgatgagagagacagtgtttgtggataattggtcattgtagccatatcaaagaaagacagcataatctattattcttgtcttgtgctttcatgtgtaacaaattgcgcgttac

SEQ ID NO: 9553 - DNA, 210 bp, Glycine max
  Clone ID: 701102624H1
caacaacaagcctctttttggatcaattctggtggcaaaagatgagacatcatcaggtgacaataatggagctttgaagaaaccaattgattacacacttgtgtggagcagcaagtcccaaaagatcaagcaagacaaagatggctatatttggctaccaacagcacctgatggctacaaaaccttaggccatgttgtcaccaccacacc

SEQ ID NO: 9554 - DNA, 208 bp, Glycine max
  Clone ID: 701102625H1
gtagaggctgctgtgaagagctataaacaagcattgattcttcgtccagacttccctgaagcaacttgcaatctccttcatacataccagtgtgtatgctgttgggaggatcgtgataaaatgttcaaggaagttgaagcgataatcaggaggcagattaatatgtccgttattcctagtgtccagccattccatgcaatagcatatc

SEQ ID NO: 9555 - DNA, 210 bp, Glycine max
  Clone ID: 701102626H1
ctcgagccgtgaaaaggaggagccagataagccagacaagccagaaaagcaatagtgtgtcgtaaatgactggtcttgattccctccagttatccttgatatgccgagccagactgctgattgctaaagtgaatgtaagggtatcacatgaatacctatagcataaaattttttagctttcttcaagttttttctagccgctaatgtgcc

SEQ ID NO: 9556 - DNA, 209 bp, Glycine max
  Clone ID: 701102627H1
ctggatttgttgtgaagatcttgcagtacatagtgccattgctgctattggcctttgcatttggcctgcagtactatggcaaaaaaagcaagtcagaaaattgaacttgagttgtgaccattgttttagtacttctattattcataagtctctaacaacagtgtcctagtggcaatagactggtgccattgttgtttcttttctttttg

SEQ ID NO: 9557 - DNA, 211 bp, Glycine max
  Clone ID: 701102628H1
ctaaaactaaaactaaaaccccactcagtcttccagtgaaaaaagaaaggcagcgatggaagaagacttcgacatccccggcggcgaggaaatggatctcggcgaagacaaggtcggcgaggcgcgggagatcggctcccgcggcctcaagaagaagctcctcaaagaaggtcaaggctgggaaacccccgaagtcggcgacgaagtccaa

SEQ ID NO: 9558 - DNA, 210 bp, Glycine max
  Clone ID: 701102629H1
ggcgatgatgcaaggtgtgcagaagaacacgctatacgtgggaggcttagcggaagaagtgaacgagttgatcctccacgcggcgttcattcccttcggcgacatcaaggacgtgaagacgccgctggaccaggcctcgcagaagcaccgctccttcggcttcgtcaccttcctcgaacgggaagatgcctccgccgccatggacaacat

SEQ ID NO: 9559 - DNA, 212 bp, Glycine max
  Clone ID: 701102630H1
ctccaccgggttacgcttatcctttggcgaccaacaacaacaaagacagcaattacaacatcatcaacaacagcatgggtgtcactcctctcctttcatatctctattatccgaagaaggcttgtcttctcaaatcaaacaacagcgtgacgaaatagaccaattccttcaagcccatggggagcaattgcggcggacattagcggagaaga

SEQ ID NO: 9560 - DNA, 216 bp, Glycine max
  Clone ID: 701102631H1
ggctctcctccacaagctcgcacctttcacctctctctacaccaataccccccattccccaccaccccgccgccacgtcatcatctccttctccgtctcacccttcaccgagaagcactccacagagcgctaccagagggaccaatgggtctaccagagcaccactcaagagggtcaacctcaaacgacgccgtttcctcctctcccgtgcgattc

SEQ ID NO: 9561 - DNA, 218 bp, Glycine max
  Clone ID: 701102632H1
cggtgattgtttgttgttgtaactcgttcttcttcttttgttgttctgtgtttgtgcttgttttttctctcacctgaaaatgtcttgctgcggtggtaactgtggttgcggaagctcctgcaagtgcggcaacggctgcggaggctgcaagatgtacccagacttgagctacactgagtcaaccaccaccgagaccttggtcatgggagtggcacctg

SEQ ID NO: 9562 - DNA, 215 bp, Glycine max
  Clone ID: 701102633H1
gaaccaagaacgtaacggttaacagcaactactttgtttcacatggacgagagaccaagaatagatccaaggcgcggtttcaaccgcgcttccagaatcttccacagcctcaagccaccactccccctccctcctcccaacgccaccttctccgccacaacctacgccctctccctccgccgcaactcgctatttcccgactccaccaccgccct

SEQ ID NO: 9563 - DNA, 196 bp, Glycine max
  unsure at all n locations
  Clone ID: 701102634H1
gtagtaagtcggaatgggtcgagtcgagtgctcgagcggctggtagggctcgagttgaggtgtgtcgcttacagtttcttagtgccgagggataacagatacacgcattactgncatgggtaaaggttgtgtcaactaaagcagatgtttctgcgcagatgctgctttgtagtcgacaatggtttggtagcattta

SEQ ID NO: 9564 - DNA, 205 bp, Glycine max
  Clone ID: 701102635H1
ctcgagccgctcgagccgattcggctcgagcgtccactgcttggcttgatgttggagaagcctcagaaactgctcctgatgatctagaaggtttacctgcttctgctgcacatgttgcaaatttgctgtctacagaacctgcagacattaagcttggtgttggagggttcagtatgggagcagctactgccctgtactccgtgtc

SEQ ID NO: 9565 - DNA, 202 bp, Glycine max
  Clone ID: 701102637H1
aatttctattacatacattttgtagctaggatgagcaagttactactcattcgtgttgctgggttcgtggcaacctttgtcaccatggtgatgatgatggtgcccaaaaacgtgagtgcccaaaacataggtgatgacatcgtcacacaagacttcttcaacagcataatcagtcaggctgatgatggttgtgcagggaaga

SEQ ID NO: 9566 - DNA, 204 bp, Glycine max
  Clone ID: 701102638H1
ccgaaaccctaaccctaacggagagatggcggacacttggcatcgatattcgggacggagaaggacagggtgaactgtccgttctacttcaagatcggcgcgtgcaggcacggcgaccggtgctcccggcttcacaccaagccgacaattagcccaacattggttctgtcgaacatgtaccagaggcccgacatgaacatgagc

SEQ ID NO: 9567 - DNA, 207 bp, Glycine max
  Clone ID: 701102639H1
ggcttctggaatcgcatagtcacatcacattcgcagcagccaaaccaaaccacaccgaaacctccaaaaccctagcccgccaccgtccatcgcgacgacaccatccgctctgctcctcatgctcctcctcatccgttttcatcccttcttgctccgtcacgtacatgccccgtcccggcgacggcacccctcgcggcgtgacgctga

SEQ ID NO: 9568 - DNA, 206 bp, Glycine max
  Clone ID: 701102641H1
cgttctagatcgcgatctagaactctctctctctctctctctctctctctctctcatgaacgacgcacttcccatgtctcctcggttctatagatggagatggaagctctgaatctcgctttcgccgaatctcgtcttctgtgttcagatttcgctattctccgtttggattgatgaaaaaaaaagccttttctcttcccgttatt

SEQ ID NO: 9569 - DNA, 205 bp, Glycine max
  Clone ID: 701102642H1
gcaaatgtctatttgtggagattttggccgtgtttttgagattggtcctgtgtttagagcagaagattcctacactcacaggcatctgtgtgagtttacaggtcttgatgttgaaatggagattaagaagcattactttgaggttatggatatagtcgatagattgtttgtcgcaatgtttgacagtttgaaccagatttgtaag

SEQ ID NO: 9570 - DNA, 205 bp, Glycine max
  Clone ID: 701102643H1
gtggcttccagtttgctgtcaaacatcttgatggtaggcaactattgatcaaatcaaaccctggggaagtcatcaaaccaggtcaatataaagcaataaatgatgagggaatgccacaacacaataggccattcatgaagggtcgcctttacatccagtttaatgttgatttcccagactcagggtttctttcccctgaccaatg

SEQ ID NO: 9571 - DNA, 205 bp, Glycine max
  Clone ID: 701102644H1
caaaccccattgaaccctattagctatgcggctcatgaacccgttcctggtttggtctacgctcagagccttgttggggatgattcatcttctgggtattgcttggaccataattgggttgccagagaggctgttaggcaatttggtactgaccctactctttatgcaccttcacgattgtggcttcgtcaccattgcgatcatt

SEQ ID NO: 9572 - DNA, 208 bp, Glycine max
  Clone ID: 701102645H1
ctcacctccactttgcttgagggttatattctattctatataaggggaagctcaacttcttcctccttgtcgcatacatagatacatgggttcggcaccagaagtgttggcctcagagaagttgtggaaagctcattgggactcggttcctacagtacttgaatggaggtcctctctccttcaaaacccaccaagccatcgttctgat

SEQ ID NO: 9573 - DNA, 209 bp, Glycine max
  Clone ID: 701102646H1
caaatttcagattgacacagagactcatgacccccttgatattggaatgtaccagatccgggaggccaatcaaatggtggaggagtttatgcttgctgctaatgtttccgttgcacaacaaattcttaatagttttccattggtctcattattaaggcgtcatccaacaccaactagagagatgcttgaacccttgttacagactgctg

SEQ ID NO: 9574 - DNA, 213 bp, Glycine max
  Clone ID: 701102647H1
cggaatcagaggctccccctaacttctggggccacaccccggaagaagaatactacacctcccaaggcgttcgcaacaccaagtcccacttcgaaacccccaacggcaaaatcttcacccagtccatcctccctctcaacctccaaccccaccaagtcaaagccaccgtctttatgacccacggctacggctccgacaccggctggctcttcc

SEQ ID NO: 9575 - DNA, 213 bp, Glycine max
  Clone ID: 701102648H1
catttgggagttaggttctgcacgctctgcttccagcgagtgttctttcttcgtttcaacaccttaatttgcacacgctgcttcttcagcttgagaaatggcacaagaaacctttctattcacatctgaatctgtaaacgagggtcaccccgacaagctgtgcgaccagatctctgatgcagtgctcgatgcgtgccttgaacaggaccctga

SEQ ID NO: 9576 - DNA, 208 bp, Glycine max
  Clone ID: 701102650H1
caaaatgttgcagcttctgtacgcggtgatatttgcggaaatgttcgtgatcgtcagctacctcttcaaaactccggcgaggaagctggtgatcgtcacattggatcggctcaagcgcggtcgcggccccgttgtcgtcaagaccgtcgccgccacgctgctggtggtgctcgcttcctccctctacagcatcgcaaaaatccggcat

SEQ ID NO: 9577 - DNA, 202 bp, Glycine max
  Clone ID: 701102651H1
gattgttgtgactcgttcttcttcgtcgttatcttcttcttttgttgtttgtgtgtttgttttttctctcacctgacaatgtcttgctgcggtcgtaactgtggttgcggaagcgcctgcaagtgcggctacggctgcggacgctgcaagatgtacccagacttgagctacaccgagtcaatcaccaccgagaccttggtca

SEQ ID NO: 9578 - DNA, 158 bp, Glycine max
  Clone ID: 701102652H1
tctggttctgacttccaagttcagtccgtgtatgacatcagtctctgggggagtgtttggttactgtttcttgttgtagctgtgtatgtgatctgaatctattccagtccttttgtgcgtctctatctctctctcgtctggattactggcaactagat

SEQ ID NO: 9579 - DNA, 203 bp, Glycine max
  Clone ID: 701102653H1
ctcgaaccgcagaggaagcaatcaaggttaaggcctctgttatcatttgcttcacttcatctggaagagctgcaaggtttcattttatctccttctatgattcccctttattaaaaagacttcttattgctgggattgttgatgccagatttcgcatttgtcaaattctttctctcaataatttagttccatgttagatttac

SEQ ID NO: 9580 - DNA, 163 bp, Glycine max
  unsure at all n locations
  Clone ID: 701102654H1
caaggacaaagtttgatgttgcggaatgagaaaaagctaattatcatatacgtagaatcccgcggaaattcatgtatgttaggtaacatcaactttccacctgacagnacacataatgaaatgaaatcaaatgagaaaataatacacgtccaaaatgaagaaa

SEQ ID NO: 9581 - DNA, 85 bp, Glycine max
  Clone ID: 701102655H1
gctatcttgttggataatgatccggcgtatcggactcacaagccttgatccgtggagttgtcgacctggcatactcggggaatat

SEQ ID NO: 9582 - DNA, 204 bp, Glycine max
  Clone ID: 701102656H1
tgcaatcatcaataagtattcagagcaacctttcctaaaagaggatagtgtttatcacaggatggatgtgatcaataagtgcttctctaaaaaggctgttgaggaaatattatcttctctcgaggtggaagctacgagaaaggctgatccttggatttctgcaactattcaatccttaaagaaagcatctccaacaagccttaa

SEQ ID NO: 9583 - DNA, 204 bp, Glycine max
  Clone ID: 701102657H1
ccaatatcttgtacacgccccctttggtagttgccctttggaagttgccttatggtaaagaacacaatgaatccctgtcgtttataattttataatattttttgttctttaatattgggctgtagaactagtcgtcctgtccaaatacatgatgtagaaaatcgcctgtttagcatatgctgttgttaaattcccatcgttgtg

SEQ ID NO: 9584 - DNA, 208 bp, Glycine max
  Clone ID: 701102658H1
gttactttccaatttgaattgttccattttcatttctttcgcaaaagttgcaactagttcctcagaaaaaaagtttctaagttaaggaaatccagacacacaaaaatcgccggttctcgttcagctacatgcatagacatcctcctttctatcattcttcctcctcttggagtctttctcaaatatggctgccaggtggagttctgga

SEQ ID NO: 9585 - DNA, 206 bp, Glycine max
  Clone ID: 701102660H1
agcaaattaatcaaacatggctagggttagtgctttgtttcactctttgctcttgatttcttcccttgtattggcttctcaaatccatgtttcctctgggaaactagtccctggactatcatggaattactatttgttgacatgtcccaagcttgagaggattataaggcagcatcttgaggatgtcttcgagaaggacagtggag

SEQ ID NO: 9586 - DNA, 208 bp, Glycine max
  Clone ID: 701102661H1
aatttatatagcaagctagctaggttgaaaatagtttggttttgtagtaagtgaggtgaggtgccaaaatggtgaagataactcttggtactttcgatgactcttttggtgttgcctctcttaaggcttatttggcagagttccatgcaactctgattttcgtgttcgctggtgttggttcagccatcgcttacaacgagcttacaaa

SEQ ID NO: 9587 - DNA, 211 bp, Glycine max
  unsure at all n locations
  Clone ID: 701102662H1
ggcttccgaagaatcccagaacaagccccccagcgagcagtccactaccgaactcatcacgagcgcgaagtgcgtggcggaggcggcgcagtcggctctgaagagcgacagcgncaaagtggacaaggccaaggtggctgacgctgccggcgatcttctcgacgcggcggggaagtatggaaaacttgatgacaaacaaggcatagggcaa

SEQ ID NO: 9588 - DNA, 109 bp, Glycine max
  Clone ID: 701102663H1
ccttgtcacaagctggtagtctaacgttgtcttcggagcctcatctgtacataggttgttctgttatgttcggtgcgtgttgtcgttcttggcatccaccatatctggg

SEQ ID NO: 9589 - DNA, 213 bp, Glycine max
  Clone ID: 701102664H1
aggggctttcctcttgcttctggccaatctaaagccaagtttcaaatggagcccaatactggagtgacatttgatgatgttgctggagtggatgaagccaagcaggattttatggaggtggtggaatttcttaagaagcctgagaggttcactgctgttggggctcgcataccaaaaggtgttcttcttgttggtcctcctggaactgggaag

SEQ ID NO: 9590 - DNA, 207 bp, Glycine max
  Clone ID: 701102665H1
gggttatttaagcctttctcgtgaaaaccgtcgcaagttgctccttgtccttgctagagagtatgatctcaataggtcacaagtgcgtgaactgataaagcagtaccttggacttgaacttcctgctgacaaagctcaagtgagtggctctgaagacgaaggcttgttctcttctttctatcgcgttgagaggaatttgaggcatgc

SEQ ID NO: 9591 - DNA, 206 bp, Glycine max
  Clone ID: 701102666H1
ccctcgagccgaatcggctcgagcggctcgaggtgagatttgcgaatctgagaaatggcggattcttctcgggaggagaacgtttacatggcgaaattggcggacaggccgagcgttacgaggagatggttgagttcatggagaaggttgcaaagactgtggaggttgaggagttgacggtggaggagaggaatctcctctctgtg

SEQ ID NO: 9592 - DNA, 202 bp, Glycine max
  Clone ID: 701102667H1
tctacactctattcaacccttcacattttctctcttctttatcttaaattacttttccatggaggaaagcaagaaacgagtccgggacgagtccagctactcacccgagtcccaaactcagctggtcgactctcccgagtctgaaagtcagcgggtcgactcacctgagtctaagattcgtcgagttgactcgtccgagtct

SEQ ID NO: 9593 - DNA, 200 bp, Glycine max
  Clone ID: 701102669H1
ctctcgagccgaatcggctcgagggctcgaggggaaaagtggcgagactcaactgcagtgcaattgctggttgtctggtcactcctgtgccgtttcctgcttcatctatgtcttgtggtattcctgctcctgtcaccgtggctgctgctgcaaaggggccctttgtgcctcctgaagatttattgagaagtaaaggggaa

SEQ ID NO: 9594 - DNA, 201 bp, Glycine max
  Clone ID: 701102670H1
cgaaatgattatcaattatcaatttgaaaattaaatatccactggaagcacggcaagaggaaaatggaagcatgcgtcgtttgggtggcttggcagggtatgggtgagtgagaaaagccgcgccgtcgcggcacggcaatagcaggtatagttctggttacgaacaccgtcatcgttggacaagcaaaagagaagtgcgag

SEQ ID NO: 9595 - DNA, 201 bp, Glycine max
  Clone ID: 701102671H1
gtttctagattttgactccacttcttccttccctatatgagcctataattcctaagcaaaatcatctcaaggtagagagacaaagatcacaagcatctaataatgatgaccagttatgtcaacctcaaaatatggcttcttaactttgttaccttgtttagtattctttctttgtcccatggaagaagagcaaatgcaaat

SEQ ID NO: 9596 - DNA, 202 bp, Glycine max
  Clone ID: 701102672H1
ctcgagccgctcgagccgattcggctcgagctctgcttccgacacacatcaatctttctgaccatatattactcttttgtctttttaatttattctccatacacatgcagacactaagttcgaacaagttcaggagcggcatggatttcttccaccgcgcgaaggcggtgcgcctccgcagccaccacgacaagtacctcct

SEQ ID NO: 9597 - DNA, 204 bp, Glycine max
  Clone ID: 701102673H1
ctgcgtttgcttctcctccacccatccacaaacgaacacacactttgattgagaatggggcgtgttcgcacaaagacagtgaagaagtcctcgcggcaagtgatcgagaggtactactctcgcatgacgctggacttccacacgaacaagaaggttctggaagaggtggccatcattccctccaagaggctccgcaacaagatc

SEQ ID NO: 9598 - DNA, 204 bp, Glycine max
  Clone ID: 701102674H1
cagaaaatggcatccgccgccgccagatctatattccgatcatgctccgcccccaggtcagcgtttcgcgtcgcatcggaagccaaaccggttcgttctccgttccgcatcgcgtccaataagcctctctcgcagtcccaatccactctcaggttccctgtggaattgagttcgtgtgtggaatcgatgatgccgtaccacacg

SEQ ID NO: 9599 - DNA, 207 bp, Glycine max
  Clone ID: 701102675H1
gccaccacctccgcattcctcctccttcccctcctcctgctgctccacctcgccatcgccgctcacggcatcggcatcaactacggcacgctcggcgacaaccttccaccgcccgcggcggtgaccgaacttcctgaagacgaagacgaccatcgaccgcgtgaagatctacgacgtgaacccggacatcctgcgggccttcgccgg

SEQ ID NO: 9600 - DNA, 202 bp, Glycine max
  Clone ID: 701102676H1
ctcgagccgctcgagccgattcggctcgaggggggttataactcctttgtcagaacagctaccaaagccactacccaatgccatggttctagtaaaccttaaggaaatatcttccagagcttataagcttttgccacaaggcacacgcttggttgtgtctgtacgaggtgatgagccttatgaagaactggacattcttaaa

SEQ ID NO: 9601 - DNA, 205 bp, Glycine max
  Clone ID: 701102677H1
ctcactcatacctcttcaatctaacaaacttaatttcttttgttttgagtttcttagagaatggatgcaaaaggagcaagaagtagcaacacccttttaagttgtgaggacgagatggaccttcgaagaggcccttggaccgtcgatgaagacctcactcttatcaattacattgccactcatggcgaaggtcgctggaacacgc

SEQ ID NO: 9602 - DNA, 204 bp, Glycine max
  Clone ID: 701102678H1
tcttcttcccaaccactactactcactcactgcagatctcaattgcatcgctgtccatggctaccatcgttagcatcaaggcccgccagatcttcgacagtcgtggcaatccaactgtcgaggtggatttgacttgctccgatggtacttttgccagagctgctgttccaagtggtgcatccactgggatttatgaggcccttg

SEQ ID NO: 9603 - DNA, 208 bp, Glycine max
  Clone ID: 701102679H1
aggagatagtgaaagagcttcttcctctaattcgagtgtacaaggatggcagcgtggagcgtcttctaagctctgaaaacgtggcagcctcccctgaagatccccaaactggagtctcatccaaagacatagtcatcgcagacaacccctacgtctccgctcgcattttccttcccaaatcccaccacactaacaacaaactccccat

SEQ ID NO: 9604 - DNA, 206 bp, Glycine max
  Clone ID: 701102680H1
caattttcatctcccgtggtgtttggttcctcttaaattctaaactaatctagttagcttctttttttctttctctcctcaaattgtgtgtgcaacaaaaattttgtagaatggaggaacttcaagggtctcaaacccaatcatcgctcggtcaagaagatgaaaatgaagtgattactgaaagttcagcatttgttaaaggggaa

SEQ ID NO: 9605 - DNA, 214 bp, Glycine max
  Clone ID: 701102681H1
ctcgaactctcattcgccatttcctcacctccttcaaccgctgctaaattctagggttccgaaatggacgctggcggaaagatcaagaagggcgccggaggtagaaagggcggcggcccaaagaagaagccggtttcaaggtccgtcaaagccggtctccaattccccgtcggaagaattggccgttatttgaagaaaggaaggtacgctcagc

SEQ ID NO: 9606 - DNA, 205 bp, Glycine max
  Clone ID: 701102682H1
cagctgccaagcttgctgaacttgccttgattgaccccaaacgtgcaaaaaggatatgggcaaataggcagtctgctgcaaggtcaaaagagagaaagatgcgatacattgctgagcttgaaaggaaggtgcaaacattgcaaacggaagcaacatctttgtctgcacaattaactctcttgcagagagatacaaatggcttaaa

SEQ ID NO: 9607 - DNA, 203 bp, Glycine max
  Clone ID: 701102683H1
gtttgttacttctcttcgccttttgctttgcaattgtcaccaaacaattcttgcttagctctcacaagcaagcattatcaacaatgaagaaaattgtgttaaaggtggacttacatgatgacaggatcaagcgaaaagctatgaagacagcatctggcctttcgggggttcaatcagtttctgttgacattaatgacaagaaa

SEQ ID NO: 9608 - DNA, 195 bp, Glycine max
  Clone ID: 701102684H1
aaaaagctcaaatatctttaccaataggcgacataactttgtgtaacgataacaaaatagcaccgtttgtttgtgtttttgccatggttcccaaaactgtagcgaaaaccatcacaacctggtggtggattggttcgatctgcgtcttcctctgctaaactgcgtacttcataaccccccaaaagagaatttttt

SEQ ID NO: 9609 - DNA, 201 bp, Glycine max
  Clone ID: 701102685H1
ggaccctcgagagtggaccctacacgttaaaataccgtggtagcatgtggggttacaagcggttacttaagagaacagcactagagacatcagattaccttaaagatgattgccttagtgttaattgtagtgttggtgttgtgaagtcacacacagagggccctaaaatatataaaatcccaattccgtcttctaacatgg

SEQ ID NO: 9610 - DNA, 78 bp, Glycine max
  Clone ID: 701102686H1
attgtttgtgattgacacagtatgatgggtgtcaaaggttttgttgaaggaggcatcggttacatcattgaaggatgt

SEQ ID NO: 9611 - DNA, 202 bp, Glycine max
  Clone ID: 701102688H1
aaagaggatgtgatggatgatgaggaagaagatgaatttggcttgtctgatatggtgctttcagatgacttctttgaaagtttggatgaactgagccaacttacggctccttctgttgtcactggagactgtttcagtgaccccttttcagcaattgcaatcccttcttgggtggctagtggtgctgctactgctagtgggt

SEQ ID NO: 9612 - DNA, 179 bp, Glycine max
  Clone ID: 701102689H1
tcgcaattcgactcaagcttcattttgttgttcgaacccaaaaccctagcagccggctagaatcgcagacgttcacgttgatgccgcagcacgggcacaggcagcacaccgaagaagagaacgttcaagaggttcagcttcatgcgcgtggatctcgacgcgcttctggacatgtccac

SEQ ID NO: 9613 - DNA, 202 bp, Glycine max
  Clone ID: 701102690H1
tttggagtttagtcccttatttttaactactgccatggaaggcaaccactgtttgatcatttcttcagatgagtatagaattggctgaaggttaggaagtgaagatagagcctggtattttgtatcttcagtgttctttgtcatcgtctcatatagttctatagttctagctgattttgattttataattagcttggttcct

SEQ ID NO: 9614 - DNA, 203 bp, Glycine max
  Clone ID: 701102691H1
cgtggctctgccaacatggatgtgctcattgcgctgggaacaaacgcagcgtatttttactctgtttactctgttttgagagctgccacctctccgcatttcgaggggaatgatttctttgagacgagtgcgatgcttatttcgttcattctgcttgggaagtatcttgagattctggccaaggggatgacttctgatgcgat

SEQ ID NO: 9615 - DNA, 207 bp, Glycine max
  Clone ID: 701102693H1
cctcgagccgaatcggctcgaggttgatattgtcattggcacaccaacgccgtgtgaaggatactattgagaagggaaataacgacctgagccaactaaagtttcgtgtccttgatgaagccgatgaaatgctgaggatgggttttgttgaagatgttgaaatgattctaggcaaggtagaaaatgttaataaagttcagacacttc

SEQ ID NO: 9616 - DNA, 207 bp, Glycine max
  Clone ID: 701102694H1
tggccaccggtggcgatttgtgggtcagagttggcggcggacgagagattggtggcggtttcagccacgagagcgagcatgatttggcgctcatggttagcgattttttagaaaatggaagtagtggcgcagagtcttggtgtagcagtgatagcgatactggacattctgatttcgctcaactcgccgagaggattcagatctgta

SEQ ID NO: 9617 - DNA, 201 bp, Glycine max
  Clone ID: 701102695H1
ctcgagccgctcagcctccaccacgctctcctctcccttccttcgactggaattaccctccagaacaaagaaacgatcttcatcaattattcctgttccctccatccgagcctccgtctccgagaaaccaccgctaccggctgtgtcggttacctcccctgagccaagcaagctccccatccgcaaaatccccggcgactg

SEQ ID NO: 9618 - DNA, 213 bp, Glycine max
  Clone ID: 701102696H1
ggagcacataataaccctcaaactccatttcactcacagaaaaatagagatatagagagagaaagtgctgcagaatacacacatacacaccacttcttcaagagagagaggtgtgtgaaggaaaataagaactgaaagacaaattttgcaaaggaagatatgaaactttgcaaatttaacaactgagaaagaagatctgtgatttctctctct

SEQ ID NO: 9619 - DNA, 287 bp, Glycine max
  Clone ID: 701102701H1
gccctcttggagccaccaatgctagaagcaactaagcctaagcactttgttggggagagtagtactagcactacgaaagtaaccaagcacttcgaaaacgagaagaatccttcgaagctagaggtgctgcctctgtcagaagggcctagggatgtttttcagtttcaagctagactttggcaagctgttaccaaagctgtgaagaagatcaagcgaaaaaatgggccccatagaggagaggatttcaccttgtcacaggcaatggccaaggctgatttttgggtcat

SEQ ID NO: 9620 - DNA, 250 bp, Glycine max
  Clone ID: 701102702H1
ttcggctcgaactcgagccgaatcggctcgaggaagaagctttgactaaccatttacattgcttgaggctctcgtttaacaagctacaagggcaaggatctgtttagaaatttccaatatccgattagtagtttagtagtgtctttctgatctgtagggtgtagggggggtatatggtatatctagtttctaagtcatctttaatgtaatttcattaccttctgtttatataattcagcggggattagac

SEQ ID NO: 9621 - DNA, 282 bp, Glycine max
  Clone ID: 701102703H1
gccagtggcctggtacaattgatcaatcatggagtgatgcagttcctcaacctattccagcagtacctggtgtcaactggggggcacctgcagaagcacctgctgctgcaggaggagattggggggaagctgttccaccaccacaacaaatccctgtacctccctctggaattgatactgtccaaccatctggctgggattaaactagtgacttttgatgctatgattttgccccgtccctcaattttagcttacctgtctttctttgaagtaaaatatgga

SEQ ID NO: 9622 - DNA, 283 bp, Glycine max
  Clone ID: 701102704H1
aagaaattgatatattcccataattaatttgaaagaagatggaagtggtggtacaaagtcctagtagtccaaacatggatactttcgattttggtggcaacatgggttcgatctttcaaagtgttccttcttcaccaaaagggtttggtaattactacctaagcgcaccggcgagtccatctaggatgtctgaattatacaccgaatttgaatattattcttcggcttcaccctcttcattcgaagcaggcaacaaaattgatgatgacgatgaagacgaaaa

SEQ ID NO: 9623 - DNA, 286 bp, Glycine max
  Clone ID: 701102705H1
caacaacaaaaaaaagtaaagaatttgctttgcgaggaagtaagtaggagatgctctgaactttcaaatttgtacaacccctaggaagagaagaagaaggttcaaaatccaatccatttttcatttcgaaagatcgtgatcgcaatgtccctctccaccgtgaggcagcggcgctcggagccgtctgatccgtcgccatcagaaccgtacacgaagctggacaagcccgagaaagcggaggagaaagacgaagggttggggtgggttttcccgttcgtggctcttg

SEQ ID NO: 9624 - DNA, 280 bp, Glycine max
  Clone ID: 701102706H1
cctctctgagattttgctccaaaaccttccccttcatctgatttgcagagactaacccaagaaaggaccaaccataaccaagtgctttcttggagcttggtagagagagaaagtcccactttctctctcttctcttttttctttctgtgtgtgttgtgtgcgtgcgtgcgtctgagggtacatgcaaaacagtgagtctgagatagcgaaagaaggagttcaagattgttgtccaattttgcaaaaactgcccatcaagtacttttgttgtttttttttt

SEQ ID NO: 9625 - DNA, 283 bp, Glycine max
  Clone ID: 701102707H1
actgtactttatccttttgtgtggggaattatggtaattgattttgagggtttgactactcatggattatgatggtatgagaaaaccttccaaaaacttatttcactctcgcttcttcctttttgggttctattgctgggattgggagttcttgaccgctctcctcctttttagttcttccccttaatcttctttcttcacaatttttatttccttccttattagacgtattagatcagattgaacaaaagggtttttctttctttctttcttggggaataat

SEQ ID NO: 9626 - DNA, 283 bp, Glycine max
  Clone ID: 701102708H1
aagaaaatcacattacctgtctctgaaatcagattcactttgttcttcatcaatggaaagagaacaactatcccttcacatgaatggtggcaagggacaaaggagttatgcaaacaactcctcactacaaagaacaataatacgtaaaaccagatccatacttgaagaaactataacgaggttgtactgtgatacttttcctaataattgcttaaaagtggcagacttgggttgctctgtaggatcaaacacacttcttgtgacatcaaatattatcgacatt

SEQ ID NO: 9627 - DNA, 283 bp, Glycine max
  Clone ID: 701102709H1
cacaattttccttcactcgcagcggaggtttacttttgatctagtacctgctatccctatgtataagcatggacttctagcatactattgtttgattaaccaagttcttccatattggttgaggaagcctcgagtcaatatttagtttttgctgccatctgtgggtttctgatggatgatgccgggcatcgtgaaaatggaaggcacaaagcagcagatcaatataaatctgctcagggacagtggttgatgcaacatcagccttccatgaagcagattatgg

SEQ ID NO: 9628 - DNA, 281 bp, Glycine max
  Clone ID: 701102710H1
gctgatgaagctcctgacacaatcacaggagacattgtttttgtattgcaagtaaaggatcacccaaagttcagaagggagcaggatgacctctatattgatcacaatctcagcttaaccgaggcactctgtggcttccagtttgctgtcaaacatcttgatggtaggcaactattgatcaaatcaaaccctggggaagtcatcaaaccaggtcaatataaagcaataaatgatgagggaatgccacaacacaataggccattcatgaagggtcgccttta

SEQ ID NO: 9629 - DNA, 280 bp, Glycine max
  Clone ID: 701102711H1
tggaagtaaagatcgttctgctgactttgaaggtgagaactccaggagcaagctttcaaggcacaattttgaggccaacaaggagtacccagatgaaaaaggtgttgaatttctgagggattcatcagaagtgggtggttgtggtggcagctcagggttgcaagagttgaccctcagctacctttgtgacaacccaaaattcaatcttgctgagaaagagattcctggtaaaagcttgttggagaaaatgagccacaaaggtaaagaggttgtggtatgt

SEQ ID NO: 9630 - DNA, 277 bp, Glycine max
  Clone ID: 701102712H1
cacaacagtttcctcgattggttgatctgctttctgggccatgttggtgtcgatgaggaggatcatgttcagaggcatccacagtgagttgtagaatagaagcaaaaagagaagttcttggtggcgatttcttagatgggtcttcttctgtgggtgtgagtgggtgtgagttttgactgtgttggaaaaagaaggctttttttttttttcttttcaatgttatgagaggcattattcttggtgggttttgtgaggggtggctttgatttgcctggat

SEQ ID NO: 9631 - DNA, 278 bp, Glycine max
  Clone ID: 701102713H1
gttaattctctgtctgatagatttgtattttgagtgatatttgggtacgtgtaggagtgaaccttcctttaggaaacaaatgagtgttagagatgtcatgttaactagtgatatgagatgaattgtaagatggtatcacagcctatcataatgatagttgttgggctcattgtgctatccaccatcactaaatgtctagtcttgcaaactttatgcccaagatgttctgactctgcatgatgggtgatctgaccaacatagagcatagaagttggtgg

SEQ ID NO: 9632 - DNA, 278 bp, Glycine max
  Clone ID: 701102714H1
gaacgggtaaaggcccctcttttttgcagcatcaacagaacaccaccaagcagatatggctacattgcaaacttatgcgttatcaaatcagctaggcgacagggaattgcaagtaacatgatgtcttttgctattgaagctgcaaaatctaatgcaggtttgacacaggtgtatgtgcatgtagacagaaataataggcctgcacagatattgtaccaaaagatgggctttgagatggttgaaatggcaaactcccggttggtagaagaaacatactt

SEQ ID NO: 9633 - DNA, 279 bp, Glycine max
  Clone ID: 701102717H1
cgcaccgtagcagaaaaaggaggtgatgagagagtgcgggctgtgggagacatgctgagattactcgcggagaggctgaggatccggttcgagttcaaaatcgtcgcgactcagaaaatcgccgagttgactcgtgagtcgctgggatgcgatgcggacgatgttctcatggtgaacttcgcgttcaagctgaagaagattccggacgagagcgtctccccggaaaaccctcgggacgagcgtcttcggcgcgtgaagagactcggccgcgcgttgtga

SEQ ID NO: 9634 - DNA, 278 bp, Glycine max
  Clone ID: 701102718H1
ctgagatactaaaaggttgtgggctacatgctgatattggaataacagttctgatagatcgtagcgtcttaaaagttgaaaagaacaacaaacttggaatgcatcaattgctacgggacatgggaagagagataatctgtgaaagttcaagaaaggaaccagggaaacggagtcgatagtggcttcatgatgatgtacttgatgtattgacaaataatactgggacagtggctattgacgggatggctctgaaattgcatttcgccggtagagcttgc

SEQ ID NO: 9635 - DNA, 284 bp, Glycine max
  Clone ID: 701102719H1
ctttgcttcagctatggagtttcgttgccttccattggttttctacctcaatctgatcctgctgacagctcatgctgccatacctccagaagtttactgggaaaggatgcttccaaataccccaatgcccaaagcaatcatagactttctaaaccttgatcaacttcctctttggtatggtgctaaggaaacccaatctacagatcaaatattcctgtatgatgctaagaaaacccaatcaacagatcaagttcctcctatcttttatggtgataagaaaaccc

SEQ ID NO: 9636 - DNA, 283 bp, Glycine max
  Clone ID: 701102720H1
gcgtctcttacgtacttgccaaagaggaacaaaagtgtttgactgttgatagcatcatcaagaagaagttgtaaagatgttagggctatttgacaagagccacaagatcaagggcactgtggtgttgatgcccaaaagtgtcttggacattaacgacttgaattcagtcaaaaatggcggagttggtggcgttgtctctggtatctttggcgccgtcgccgacgtaaccggccaaatagttgatactgcaactgccatcttttcccggaacgtctccttcaag

SEQ ID NO: 9637 - DNA, 283 bp, Glycine max
  Clone ID: 701102721H1
ctcgagccgctcgagccggcaaattctcgttcgggctcgacccgggttgtctcctaccgaatctcccagtctcggacctcgccgtcgcgtttgacctggcctcaaagctctccgccgaacgcgccatgaacgcgtcgccgtttatttggaaactaaaacgactcctcaacataggatccgagaagaaactgagagaaacaattaacgtcgtaaacgacgtcgcaaaagagatgataaagcagagaagagaaatggggttccagacgcggaacgaccttctctc

SEQ ID NO: 9638 - DNA, 276 bp, Glycine max
  Clone ID: 701102722H1
tttgggagttaggttctgcacgctctgcttccagcgagtgttctttcttcgtttcaacaccttaatttgcacacgctgcttcttcagcttgagaaatggcacaagaaacctttctattcacatctgaatctgtaaacgagggtcaccccgacaagctgtgcgaccagatctctgatgcagtgctcgatgcgtgccttgaacaggaccctgacagcaaggttgcctgtgagacatgcaccaagaccaactggtcatggtctttggagagatcacaac

SEQ ID NO: 9639 - DNA, 283 bp, Glycine max
  Clone ID: 701102723H1
aaactcttctctctcttcatctttctctgttcctcacaattcactacatcctacaaatatattcaaggtcccatttttctcatctgggtcatcaacttaatcatctctctcttgttctctatccaattaattgcttttccctctgagtttctctccaccttgttgttgttgcaacttgatttcatggttgcaaaatgaagtgtttcttctttaaggagaagagcaaatccgccccggaactgcacaagaagaaaacccccgccgtgaaccgcgccgcaaactc

SEQ ID NO: 9640 - DNA, 219 bp, Glycine max
  unsure at all n locations
  Clone ID: 701102725H1
ttataaagatatcatactttttcatagtagtgtgtgtctatgggtttacgtcaattgntcgtatactccatttttctgtctttagtaattgtttttctgctttgtgtttctcattattttatataaatttcattcatttttattttctttgtatttttttatttttgtttttgtgtggatgcagtggctttcgtctcttctctgcttcctttccctgac

SEQ ID NO: 9641 - DNA, 279 bp, Glycine max
  Clone ID: 701102726H1
caagtctttctctcctttcttctccttctcgcactgccatttgaaacccctgacccgaatcgtttcctttctcctcatcctctgcctcagtctcccaggatccaatataaatggaaatggaagcttcaaaatttatggctacaacgaactgaagcctctatcagacttagcttgcccgggttagtggaagaatttggggtgaagtaaagtgaaaaattgccttacgttagaaacgtgatcaagttccatggaagaagagcatcaatgttctggaagtgg

SEQ ID NO: 9642 - DNA, 277 bp, Glycine max
  Clone ID: 701102727H1
atcctaagtctttgggaatagtgctgcaatggcttcaagtcaggaggaggtgaccttttgggagctaactggaagcccatttgtgtgcagggttcatattgccctcaagttgaagggagttcaatacaaatatgtcgaagaaaatttgaggaacaagagtgaactgcttctcaaatccaacccagttcacaagaaggttccagtgtttattcacaatgagaagcccatagcagagtctcttgtgattgttgaatacattgatgagacatggaagaac

SEQ ID NO: 9643 - DNA, 278 bp, Glycine max
  Clone ID: 701102728H1
tgtgaaaatggcggtacccttgctctccaagaagatcgtgaagaagcgcgtcaagaagtttatacgcccccagagtgatcgcaagatctccgtcaagccaagctggcgcagacccaagggtattgattctcgtgtcaggagaaagttcaaaggatgcactttgatgcccaacattggttatggctcagacaagaaaacccgccattatctaccaaatggtttcaagaaatttgtcgtgcacaatgtgaaagacctggaacttctcatgatgcataaca

SEQ ID NO: 9644 - DNA, 275 bp, Glycine max
  Clone ID: 701102729H1
caagaatgactttgaccttggcctcaatgctcttgattatgaggtctggcttggtgatgttagcattggaggagcagaacttgccaaatctgcaaagctcgtgaaaagtgggattagtgacattgatgttccaattaccttcaggcctaaggattttggctctgctctttgggacatgattagaggaagggggacaggctacacttttaaaggacatattgatgttgacactccctttggagcaatgaaactgcccatcacgaaagaaggtggta

SEQ ID NO: 9645 - DNA, 280 bp, Glycine max
  unsure at all n locations
  Clone ID: 701102730H1
agaacacttaccttaatttcgccaaatcaaccaaagacaaaaaaaaaagaatccaaaggaacagaagagaaagcttgaagctatggggaacaccatgggaaggagtaaaaaggccaaggtgatgaaggtggatggagagacgttgaagctgaaaacaccagcgagagcaaacgacgtcgtaaaggactacccgggccacgtgcttctggactccgaagcggtgaaacattccgnggttcgggccaaacctcttgagccgtaccaggaactgaagcccaca

SEQ ID NO: 9646 - DNA, 276 bp, Glycine max
  unsure at all n locations
  Clone ID: 701102731H1
gagagatccatccttacaactaaaactatgtctcactctctacattcacatttcacacacacaaaaaactcaaagaaatganncttttgnccttctctctcggncttcatcttcttcttctcctttgactcaacaaccctccctctctctctttcacacagagagatactttctctctctacactgcaatggacgccggcgaagcctctccgacgattcgaatcggcccaattccgccgccgacgcagcttcggcccccgcgggagcaaggtacaa

SEQ ID NO: 9647 - DNA, 280 bp, Glycine max
  Clone ID: 701102732H1
ctgctcttcttgatttggcttccccggatagttttggcagattgcatgacaggggaaaggaggccccaaagccaaacaaaaccttaactaagcttttcccaaataaagtgacaattcacatgccacaggatgagacacttctagcatcttggaagcaacaactcgatcgagatgttgagactcttaaaattaaaggaaatttgcacaacttacgcacagttttgagccgatgtggggtggaatgtgaaggactagagaccttgtgcattaaggatcagac

SEQ ID NO: 9648 - DNA, 282 bp, Glycine max
  Clone ID: 701102733H1
cttatcatggcttctcacaacatcaaaatccacgaccacttaaggctttcccctccctcagcaacagaaatatccctctctctcactttcttcgacctgttctggctcaggttccaccccgtggaacgcatcttcttctacaccctccctacaccccattcaaatccatccattttctattccaaacttgttccaaagctcaaaacatctctctctcgcactctccaacacttcccccctctcgccggcaacgtcgtttggcctgataacacccaaacccca

SEQ ID NO: 9649 - DNA, 282 bp, Glycine max
  Clone ID: 701102734H1
atcttatcttatccctctaatcactctagctgttgcaaatttctactatttttcaatggcttctgcagatgttgagttccgttgctttgttggtgggcttgcttgggtcaccggcaacgatgccctcgagaaagccttttcaatctacggcgacatcgttgaatcgaaggttatcaacgaccgtgagactggaaggtccagaggattcggatttgtgaccttcgcctcagagcagtcaatgaaagatgcgatcgcaggaatgaacggccaggaccttgacgg

SEQ ID NO: 9650 - DNA, 282 bp, Glycine max
  Clone ID: 701102735H1
gatcgatctggtagaaacgatgaaggaactatgggcacaaatggggtcactaatggccactattgtgttcatgtacacaatctttgagcgcttcttccctccacacttgcgtgaaaaacttcaagcctatactcaaaaactcaccaaccatttcaacccttacatccaaataagcttccctgagttctcaggggaacgactgaagaagagtgaagcatacacagccatccaaacctacctgagtgcaaactcatcccagagagccaaaaggctcaaagctga

SEQ ID NO: 9651 - DNA, 279 bp, Glycine max
  Clone ID: 701102737H1
gaaattaccagttactatactctctctttctgaaacaatttgcccaattgtttgagtggcttttgccaggatggtactcttatccagtattttggtcttggatcagaaacaagaggaaccgccactgatattccagacccttttggaattgaagttggaaacccttcagaaattccatatggatatgatgataaatggttgatcaacgtgcatgccattgacacaaggggcgtggaagataggttagggtgcattgagtgtaggtgtgacctttataat

SEQ ID NO: 9652 - DNA, 267 bp, Glycine max
  Clone ID: 701102738H1
ccttaagttacataacagttgtttcagttcctaatggcaaaacgtatcaacactttggaaaaaagataaaggggtttaacattcctgtcctataatgcaatgccattatagaattacttgcctgcctgaattgaaaaggtggagattgttaagattataacatttgttattcttttttttttttcctatattgacatactgtacaatcacataatttcattgtgtcgttgctcatttgtatttgttatcaggcagagggtttttggc

SEQ ID NO: 9653 - DNA, 280 bp, Glycine max
  Clone ID: 701102739H1
ctgtatactattgtgtttgcttgcaacttttgggtatatagttttgcaagtttcaactgttagctcttcctagcttttgctacaaacgctgattgaccacttttctatgcttgatttgtgtgattgttttgtctatttagcttgtctattattaaataacacaagggtatggatgctgctgcaagtcaaagtctctatccattgcaccgttgcaaaactgttcacctggttaggcatgcgcaaggagttcataatgtagcaggagagaaaaaccatgatg

SEQ ID NO: 9654 - DNA, 274 bp, Glycine max
  Clone ID: 701102740H1
cgggttgaaacgaaacttatcttgggaagctgcaacgagcgaagagcagagaaatggtggttgggcagcttgttccttcgaatttgttcctgaatcgttctgctgcgaccagacacagacaccttctttgtgtttctgcaaatgacacaacctcaaccaataacacggataacggttctccattctcaagtttcggaagactcaaggcccagaaagtgaagactctcctggtccacagaagaggaaaggaccaaagccatagacgccccgttca

SEQ ID NO: 9655 - DNA, 279 bp, Glycine max
  Clone ID: 701102741H1
ctcagataaaagctttgtatgatgcaaaattcaattttaaaacaacaaggctttccaagaaaaagagttatcttgttcaaattgaaattattgcaactctttccaatcctcacaatagaaagaaagagtttcttattagttataacatttattgattattgactataaaaaaaatatgtaaagtttttttttggaaggcaaaattaagaatattattaataaactaaacagtaccaggggtactgaagatagcaattacaaggcactaggtgccacctt

SEQ ID NO: 9656 - DNA, 276 bp, Glycine max
  Clone ID: 701102742H1
gccgaagaacaagggaaagggaggtaagaacaggaagaggggaaagaacgaggcggacgacgagaagcgggagctggtgttcaaggaggacgggcaggagtacgcgcaggtgctccggatgctggggaacgggcggtgcgaggcgatgtgcatcgacgggacgaagaggctctgccacatccgcgggaagatgcacaagaaggtgtggatcgccgccggagacatcatcctggttggactcagggactaccaggacgacaaggctgacgtcatcct

SEQ ID NO: 9657 - DNA, 275 bp, Glycine max
  Clone ID: 701102743H1
aagcaacaatcattgaattaattgcaccaaatattgttttgctgtaatcaatactccaatggggaatgcttggggggaaagaaaaccacaaaggtgatgaagattgatggggaaaccttcaagcttaaaaccccaataaaagtttgtgatgtgctaaaagaccaccctggccttgttctgttagaatccgaggctgtgaagcattatggtataagagcaaagcctttggaagcccacaaggaattgatgccgaagaggctttacttcctcgtgga

SEQ ID NO: 9658 - DNA, 274 bp, Glycine max
  Clone ID: 701102745H1
aaatatctgatgcaggtgtacaatcggtgagccttgacggaagcaaggacttggtgacagtgaagggaacaatggacgtgaaggagatggtgtcgtacctgaacgagaagctgaagcgaaacgtggaagtggtgcctcctccgaagaaagacgacgataagaaagagaaagaaggtgacggtggcgaaaagaaagagaaagagaaagacggtgccggtgagaagaaagagaaagacgttgctgcagcggcggaggttattaacaaaatggaata

SEQ ID NO: 9659 - DNA, 276 bp, Glycine max
  Clone ID: 701102746H1
ctcgagccgcacgtccgctccgtcatgagcgacattagggttctacgcaacatggacgacgacgaggtcttcaccttcgccaagaacatcgctgcgccttatgacctcgtcatgcagaccaagcagcttggccgcctccccgttgtccacttcgccgccggcggagtcgccacccccgccgacgccgcgctcatgatgcagctcggctgcgacggcgtcttcgtcggctccggcgttttcaagagcggcgatcccgcgaagccgccacggcgattg

SEQ ID NO: 9660 - DNA, 274 bp, Glycine max
  Clone ID: 701102747H1
cagctacaaaaatttcgtgaagaacttaagaatcgctcacgagtcttaaagaaacttggtcatattgatgctgatggtgtagttcagttgaagggacgagcagcctgcttgattgacacaggcgatgaactccttgtcgctgaattaatgtttaatggtacttttaatgaccttgaccatcatcaagttgctgcccttgcaagttgtttcataccaggagataagtcaactgagcagatacaattgagaacagagcttgctaggcctctgcaac

SEQ ID NO: 9661 - DNA, 279 bp, Glycine max
  Clone ID: 701102748H1
tgtgctctggaatggagttgcgcagatcagttagacaaatgtgttgttgcgtagaaaggaagctgtttcttttactttttcgatataacgtcaagtgacccaagtgccaccactttcgatccaagttcacattacatccaactccatctaggttcattggattctcaaaacccagcaaccactactgcatattcagattgttcgtttaaaaggaagcattggtcggtacttggtcgctacaaaaaatgccaattgttcagaaattgtatgatacctgca

SEQ ID NO: 9662 - DNA, 278 bp, Glycine max
  Clone ID: 701102749H1
atttcaacctctctttcttttcttctcgcagagcgaaatcccaatcccacacaaatggcatgctcagccacctctgcttctctcttctccgcaaaccccacacctctcttctctcccaaatcctccctctccctccctaacaactctctccacctcaaccctctccccacgcgcccttctctctccctcacgcgcccctcgcacactcgccgctccttcgtcgtcaaagcctcctccagcgagcttccgctagttggaaacacgcacggatttcgaag

SEQ ID NO: 9663 - DNA, 280 bp, Glycine max
  Clone ID: 701102750H1
acctgatgtacttgattaccttctctccaatctccacaccgcggtgcataaggagcttaaagggttgttatgggatgatgggtctgcaccggaaaattcaatgataaaggaggacaggttgtgagattttactgtagatgttacggtcactgatgaagatgatgcttgttcttactgtcaaaccagctcctccgtcgtgccaagctttcaagccaccgcgaaagactttgtagtcgctgcgtttgtgaacgacaagcgagcgtttagatctaggtttttt

SEQ ID NO: 9664 - DNA, 93 bp, Glycine max
  Clone ID: 701102751H1
ccgacgccgactggggagccggctcacttcggctcagacttccgggtggacatgatgacattgcgcggtccgtcggcggggtcgccttcagcg

SEQ ID NO: 9665 - DNA, 278 bp, Glycine max
  Clone ID: 701102752H1
ctctgttctaacgcggggtgcgggaggcccgagacgaggaagcacgagtttcgaaggtgttctgtgtgcggcgaggtgaattattgctcacgcgcgtgccaagcgcttgattggaagttccggcacaaagcggagtgcgcccccgtggagcgatggctcgacgaggacggcgaagatgtcggtaacgacgacggtgacggagaggtcgaggttgttatggtagatagttagacaatttttacaacagtaacggcaacggaagtcgctttggacggaaa

SEQ ID NO: 9666 - DNA, 279 bp, Glycine max
  Clone ID: 701102753H1
ctccaggacaattcccttcacccaacctaattggtacttgttggttgatctaccttgcaccttgagatagtaaagttgcaaactttgaagcaattagtgtagaagatgagtacgttggatgcaacaagggctgaacttggtcttcttgttttatatttgggcaaagctgaagccagggacaaaatatgcagggacatacaatatggttcccgatttttgagtaacggggaacctgggactactcagaatgtcgacaagacgaccaatctcgctcgaaaa

SEQ ID NO: 9667 - DNA, 272 bp, Glycine max
  Clone ID: 701102754H1
tttgttttgtgtgagttttttttaccctccccgtacatcaagagagaaaaagatgacgactaatttagaatttaacaagaagataaactcaaaaactactaaaataatttaattttaactttaacgtagtaatcatgttttgtttgtgtttagaaaattggaagtggggaagggctaagaaggttgttggcattattagtgcattgtgattgtgcacgttggtgtttatgacatttatttagaggataggtttggtcggtgaatcttttggg

SEQ ID NO: 9668 - DNA, 278 bp, Glycine max
  Clone ID: 701102755H1
tgggacttttctttctttctccccacacccagattcaaaaactcacctctgctctttcgtttggatctcaaaacatgttcttcttcgattggttctatggcattctagcttccctcggtctctggcagaaagaagccaaaattctcttcctcggtctcgataatgcagggaagaccaccctccttcacatgctcaaagacgagagattagttcagcaccagccgacccaacaccccacttcggaggaattgagcattgggaagatcaagtttaaggct

SEQ ID NO: 9669 - DNA, 282 bp, Glycine max
  Clone ID: 701102756H1
ctcgagccgaaaagcatggccccttattctctctctccttcggctccatgccaaccgtcgttccctccacccctgagttgttcaagctcttcctccaaacccacgagacaacttccttcaacacaaggttccaaacatctgccataagacgcctacacttacgacaactctgtggccatggttccattcggaccttactggaagttcgtgaggaagctcatcatgaacgaccttctcaacgccaccaccgtcaacaagctcaggcctttgaggacccaacaa

SEQ ID NO: 9670 - DNA, 276 bp, Glycine max
  Clone ID: 701102757H1
gccgtggcgcgcctctcgctaaggtcgccttccgccacccgttccgctacaagaagcagaacgagctcttcatcgccgccgagggtctctacaccggccagttcatctactgcggcaagaaggccaccctcgttgtcggcaatgtgttgcctcttcgatccattcctgaaggagctgtcatctgcaacgtcgagcaccatgtcggcgaccgcggcgtcttcgctagggcgtctggagactacgccattgttatcagtcacaaccctgataatgaca

SEQ ID NO: 9671 - DNA, 272 bp, Glycine max
  Clone ID: 701102758H1
gcggaactcatgctcgaacaccccaactattttttggtcaattctcgttctttgcatataggaagaagattctctgctctcggtgctgatgaagagttggagttcggcaacgtgtatatcttcttcccgatgaggagagtgaactctcttgtcaccgcccctgacatggcagtactcttcttggccgccaactctgccgccaaaagattgtccggcagtaaggcgcgtgttctgccggacaactgtggcggtaaagcatggcaacaacggga

SEQ ID NO: 9672 - DNA, 116 bp, Glycine max
  Clone ID: 701102759H1
tccaattcttctcttcccaatctgggttttctctataacccttcatggttaactctttttccatttgggtctctctctcctccttcggatctgcttctgattccacataaaataaa

SEQ ID NO: 9673 - DNA, 275 bp, Glycine max
  Clone ID: 701102760H1
gtcactgccggaagaagggagcaacaccatctttcattttccggcgatctcttgtttcttccatcatcaccgttttccggcgatccctaatcctcgcaaacagaaatgacgacatcaaggcgccttgcggacaggaaggtggagaagtttgagaagaacatcacaaaaagaggatttgtgccagacactaccactaagaagggaaaagactaccctgttggcccagtgctgctcggtttcttcgtctttgttgtcattggatcatctctcttcca

SEQ ID NO: 9674 - DNA, 268 bp, Glycine max
  Clone ID: 701102761H1
gaaagaaaaccctagcttaccttttcaactttcaagatgcaaatctttgttaagacactcactggtaagacaatcacccttgaggtggagagttcagataccatagataatgtaaagtccaagattcaagacaaggaagggatcccaccagaccagcaacgtctcatttttgctggcaagcagcttgaggatggacgtacacttgctgattacaacattcaaaaggagtccactctacacttggtgctccgtctccgtggtggaatgc

SEQ ID NO: 9675 - DNA, 278 bp, Glycine max
  unsure at all n locations
  Clone ID: 701102763H1
taggtgatggcatcgaggattctattccatttccattatcataacagaaatcagcatgntctgtatcggagaaggttgatgaggtgaagacatctgttgttgtcagggttgatccaggactgatgtccataaacacagatttgccttcttccttggtgatggagcaagataaagctgatgcatcatatgatagcccactggccgctgcagaaccaaaatattgtttgactggagagaattgtgaagatgctaatgaggaaccgaatccttcagaagct

SEQ ID NO: 9676 - DNA, 222 bp, Glycine max
  Clone ID: 701102764H1
ctcgagtcgttctcgatgaaaccctaagcttccactttcaatctcatcagatcctttcgtggctcgcgcgaaaccctaattttgaatctgcaaaaatgtctgcagttatggatatgtcgctcgatgatataatcaagaccaacaaaaaatctggatccggaagttcccgtgtgcggatacagacctcccggttccggaccttatcagcggttccccaaccgt

SEQ ID NO: 9677 - DNA, 276 bp, Glycine max
  Clone ID: 701102765H1
cgtgtattggctctttgaaattggagctgggatctgtgacatgtttgggcgctgattgacttgcttggatgttgtttcttggtggggtttgtcctggcaatgggagctttatatagaagcagcatgatgagaggagcagcagccctgtgcagctttccaagtttttagggcgtgacaaagatgacggtgtccgtcgcagtgctgtatctggcaagaagattcttctgaaacttgagactacaaaggaagataaagtggctgaaagccagagaaacg

SEQ ID NO: 9678 - DNA, 275 bp, Glycine max
  Clone ID: 701102766H1
ttaattcagaaagagctccagagtttttctgaaccaaaagaggtaatgatatttttcagtgcccatggtgtacctgtcagttacgttgaggaagctggggatccataccgagaccaaatggaggagtgcatcttcttgatcatgcaagagttgaaagctagaggaattagtaatgagcacactcttgcttatcagagtcgagtgggtcctgtacagtggctgaaaccatatactgatgaagttctcgttgagcttggccaaaaaggtgtgaagag

SEQ ID NO: 9679 - DNA, 262 bp, Glycine max
  Clone ID: 701102767H1
caaattctttgagttgaacacaggggccaagattccttctcttgggttagggacttggcaagctgaacctggtgttgtagctgaagctctcaccacagccattcaggttggatacaggcatattgactgtgctagtgcgtataagaatcaagcagagattggttctgctcttaagaagctttttgatgatggtgtggtgaagcgtgaggacttatggatcacttccaaactctggtgttcagatcatgcaccagaagatgtg

SEQ ID NO: 9680 - DNA, 274 bp, Glycine max
  Clone ID: 701102768H1
agcccgtggagaagtgtttgcgggatgctaagatggacaagagcaccgtccatgatgttgttcttgtcggtggttctactaggattcccaaggttcaacagttgttgcaggacttcttcaacggaaaggagctttgcaagagcattaacccagatgaagctgtaccctatggtgcagcagtgcaggctgccattctcagtggcgagggtaatgagaaagtgcaggatcttctgttgttggatgttactcctctctcccttgggttggagaccgc

SEQ ID NO: 9681 - DNA, 205 bp, Glycine max
  Clone ID: 701102769H1
cattgttgtaactttttgattcctaaattctctaaaattcgaaattctaatttcgttatgggaaagacattgtttgtctctgagtgagtctggctggcaaaggcgacggtcgtgctatcggtgtcgatttgggcgactacgtagtcctgcgtcggggttccgcaacatgggcgccgtgaagtcattgccagcgatcatggtcgtc

SEQ ID NO: 9682 - DNA, 262 bp, Glycine max
  Clone ID: 701102770H1
ccaaaagccaagttaattccctttctccactcttcacaaacacaaacacacgtattctcttgcaaaactaagaatgaaggaggagttggtggttgaagaagggtaccttttcaaagaagagactcacttcacagtgcgcaaaacctctctcttcttcaacggtgatggcttcgctgtctacgattgcaaaggccaactcgttttccgcttcgactcctacggtccccgcgcgcgtgacaaggacgagctcgttctcatggat

SEQ ID NO: 9683 - DNA, 276 bp, Glycine max
  Clone ID: 701102771H1
gctttgtttaggtgaactaattcggagaccttgcaagacttcatcaatggctgtcaaagtttatattgtgtactactccatgtatgggcatgttgagaaactagcagaagaaataaagaaaggggcttcctctgtggaaggtgttgaggccaagttatggcaggtacctgagacactgctggatgaggtgcttggtaagatgagtgcaccacccaagagtgacgtaccagtcattacccccaatgaactatccgaggctgatggctttgtattcgg

SEQ ID NO: 9684 - DNA, 274 bp, Glycine max
  Clone ID: 701102772H1
gcgtgttttgacatacacatctccatggccagcggaccatccaaagtcagatgaatattgttcagatccacggttggcagcatatgctgtaccatacaaacaagtagtttccggtaatgatgcggcgaaggattacttgcagaaacaagttacgctattgagaaccaagactcactggaggaaagcttacttttacttgtgggatgagccactgaatttggaacaatatgattctgttcgaaatatggccagtgagattcatgcttatgctcca

SEQ ID NO: 9685 - DNA, 275 bp, Glycine max
  Clone ID: 701102773H1
atcagcatcaggaggactgggagcaagcacaatatgcagcagcttttgagtgggaaggtttcaggtaattaaagccttcgtcactataccctccaacaacactctcgcgcgccgccgtagctagcctcgaacaagcttctcgcgcgccgccatagctagcctcgaacaagcctctcgcgcgccgccgtagctagcctcgaacaacacctctgaagaccttcctcagttactgaggtctcccttcctgagttcgcatcatcactcagctcccaccg

SEQ ID NO: 9686 - DNA, 262 bp, Glycine max
  Clone ID: 701102774H1
aaagactcagatgaggcgcatagagaacgccacaagcaggcaagtcaccttctcaaagcggcgtaatgggttgctgaagaaggcctttgaactttctgttctttgtgatgctgaggttgctctcatcattttctctccaagaggaaagctttatgaatttgcaagctccagcatgcaggacacaattgaacgctaccgcaggcataacaggagtgctcaaacagtgaacagatctgatgaacaaaatatgcagcatttgaag

SEQ ID NO: 9687 - DNA, 272 bp, Glycine max
  Clone ID: 701102775H1
gggacatcccaagctgactgtgctgttcttatcattgattccactactggtggttttgaagctggaatttcaaaggatggacagactcgtgaacatgctctgctttcattcacccttggtgtgaaacagatgatttgttgctgtaacaagatggatgctactacaccaaagtactccaaggccaggtatgatgaaattgtgaaggaagtttcttcctatttgaagaaagtaggatacaaccctgacaagattccttttgttcctatatctgg

SEQ ID NO: 9688 - DNA, 272 bp, Glycine max
  Clone ID: 701102776H1
tttgtgcgcactggagctgagcagttgcagactgcgcggaagcaccagaagaataccaggacatggacctgctattgtatcttacttcttctggtgatcatcttgtttgtggtgctcttcactgtgaagccgtgggaaaatagcagtagtggcggcaatgggggtggtcagcctgcaccagctcaaacacctccatcaccttcacctcctgttaatgcttaaccttgggggactatgagtctatatttcacgaagcatattggtttcattta

SEQ ID NO: 9689 - DNA, 271 bp, Glycine max
  Clone ID: 701102777H1
tctgaggcctgtgcggtgctctgagaggaggggccatagtttgggaccctttgaaccctaatctccacccaaacccattttcccgggaagttccctctgaaacgaagacgaaaatgcagaatcacaggctgaagcagcagcaacaagctctgatgcagcaagctcttctccaacaacagtctctctaccaccctggtctccttgctcctcctcagattgaaccaattccaagtggaaatctgcctcctggttttgatccaagtacttgccg

SEQ ID NO: 9690 - DNA, 104 bp, Glycine max
  Clone ID: 701102778H1
catcttccggttatgcaatgtttccattgcatcaaaacggtaacattgcataaccaaaacataaattgtgagtaacaggagaaaaggaaattttatcagaattt

SEQ ID NO: 9691 - DNA, 273 bp, Glycine max
  Clone ID: 701102780H1
gagagacataaaaaataaacatatattgagaatggagggttgtgtgaagaagttgctatgccttgttgggtttgtggtgcttgtgagtactattggtggggtggagagtgctggtgaatgtgggaaatctacaacccctgataatgaggcttataagcttgcaccatgtgcctcagcagcacaagatgagaatgctagtgtttctcagagttgctgtgctcaggtgaagaaaattgggcagaaccctagttgcctctgtgcagttcttctctc

SEQ ID NO: 9692 - DNA, 215 bp, Glycine max
  Clone ID: 701102782H1
cgcctccgcgccgatgccggcggttccctccgccgtgatcggcccccagttctgcgcgccgtacccggtggatctggcggtggtgaagaaggtgatgaccatctctgacaacttcgttgtcaccgacgtcaacgggaacatcgtattcaaagttaagggatcgctcgcgaccctccgtgaccgccgcgtcctcctcgacggcgccgggaaccccc

SEQ ID NO: 9693 - DNA, 276 bp, Glycine max
  Clone ID: 701102783H1
attaactctttcttctcataactctgccgccgcaacagccccaaatccaatggcttcagagaagaaactttcgaacccaatgagggagataaaggtgcagaagctcgtcctcaatatctccgttggcgagagtggagatcgtctcaccagagccgctaaggttttggaacagcttagtggccaaacccctgtgttttccaaagcaaggtacacggttcgttcctttgggattagaagaaatgagaagattgcatgctatgtcactgtcagaggtga

SEQ ID NO: 9694 - DNA, 276 bp, Glycine max
  Clone ID: 701102784H1
accaaaaccaatctctttcaataatcaacaacaatgacaaacttgaagcctctaattctcttcttttatctcctagccattgttgttatgatttcaataccatcaagccactgcagcagaaccttgcttccagaaaacgaaaagctgatagagaacacttgcaagaaaactcccaactacaacgtttgccttgagtctctgaaggcaagccctgggagctccagtgctgacgtcacagggctggctcaaatcatggtcaaagagatgaaggccaaa

SEQ ID NO: 9695 - DNA, 273 bp, Glycine max
  Clone ID: 701102785H1
ctcccctttgccgctgttgttgttgctgcaccaccgaacaacttcccctgtaaatcgcgtttcgtttgtgcaaggttttaaaagatggctgatgctgaggacattcaacctcttgttgttgataatggaactggaatggtcaaggctggttttgcaggtgatgatgctcctagggccgtgttccccagcattattgggagaccacgccatactggtgtaatggttgggatgggtcagaaggatgcttacgtgggtgatgaacccaatcaaaaa

SEQ ID NO: 9696 - DNA, 272 bp, Glycine max
  Clone ID: 701102786H1
gggaaggaagatgagctggcgcagggtattgaattcagcacaggccttggctgcacacactttccttttgtgcttcactctcttcctcgttctcacgatcgatcacaatctctcttcttcttggtgggtaatatttttacctctttggatgttccatggtgttgtggctcgaggaaggttttcattacctgcgccatctgctccacgtaatcgaaattgggctccatgccatgccgttgttgcaacaccattgcttattgcatttgaattgc

SEQ ID NO: 9697 - DNA, 275 bp, Glycine max
  Clone ID: 701102787H1
aatttctctctgtttccttcttcaccgcatcaatggagttggacggcgttctcctcggcatgtgcaaccctctcctcgacatctctgccgtcgtcgacgacgctttcttgcaaaaatacggtatcaagttgaacgatgcgattctcgctgaggataagcacaaacctatgtatgaagaattggctaacaatcctaatgtggagtacattgctggaggtgctactcagaattcaatcagggttgctcagtggatgcttcaagcaccaggtgccaca

SEQ ID NO: 9698 - DNA, 146 bp, Glycine max
  Clone ID: 701102788H1
aaaaaacacttagtaacagaaacacaatcacattcattcttgtctcaatggcaacagacagtagcacccatccacggcgatatcttagtcggccatattcctcgcacgcagccacttcatccaccttagtgcccgcctacctcacg

SEQ ID NO: 9699 - DNA, 269 bp, Glycine max
  Clone ID: 701102789H1
ctcagagctgaagtacctaaaaataacgattcctcggcggtgcaatcgttcgagtccaccgccatacacaccgaatcaatttcttcggagatcaatttccccttttccgttttggattttcttgcgttgcctaatttctcggcaaccaaacagcttctacaacttccatttccattccgttgattttgccgcatctccgatcatggaagctcctgacaactcagaagccaccgttccatataattctccaaaactagctggaacagtta

SEQ ID NO: 9700 - DNA, 267 bp, Glycine max
  Clone ID: 701102790H1
caaacactctgtaactctttattttattttctttctttctttctccgatcgcatagctcgctcgcaaccaccatgccttcccgaagaagaactctcttgaaggtcatcattctcggtgacagtggggtggggaagacatctttgatgaaccaatatgtgaataagaagtttagtaatcagtacaaggcaaccattggagcggattttttaaccatagaagtgcaattcgaagataggcttttcactttacagttttgggatacagct

SEQ ID NO: 9701 - DNA, 268 bp, Glycine max
  Clone ID: 701102791H1
ctcatcattctcatattattgtcgccacttcgacctcaatcaccctcgcgccctcgatcttcccttcctggtggcgacaatgtcgactcctgctaggaagaggctgatgagagacttcaagaggctgcaacaagacccgcctgcagggatcagcggtgccccccaggataacaacataatgctgtggaatgctgtcatatttggtcctgatgatactccatgggatggaggcacgttcaagttgactctccagtttactgaggattat

SEQ ID NO: 9702 - DNA, 268 bp, Glycine max
  Clone ID: 701102792H1
ctgtggtattagcaggattgcttgcatccctgaaattagttggtggaacttagttgaccataccttcttattcctgggtgctggagaggctggaactggtatagctgagctgatagctcttgagatttcaaagcagactaaagctccagtggaagagacccgcaagaagatctggctcgtggactcaaagggacttattgttagctctcgtttggaatcacttcagcagttcaaaaagccttgggcccatgagcatgaacctgttaag

SEQ ID NO: 9703 - DNA, 263 bp, Glycine max
  Clone ID: 701102793H1
caacaacgtgatcggactcctgaacttcctgaccttcctcctctccatcccgatcctggtggccggagtgtggctgagcaagcagggcgccaccgagtgcgagcggtggctggagaagccggtgatcgcactcggcgtcttcctcatgctcgtctcactcgccggcctcgtcggcgcgtgctgtcgcgtgtcgtggctcctctggctctacctcctcgtcatgttcgtcctcatcgttcttctcttcgccttcagcatcttcg

SEQ ID NO: 9704 - DNA, 272 bp, Glycine max
  Clone ID: 701102794H1
agataacgcgatggttgacgtggactttggaacctcgggctcgccgaagcgccacaaccacaacggcttcatcgtaacaatctcggcgatcttggcgctgttaaaaaagcgcaaagcagcagtgaaggcgagcaaagaggatgaattgaagaagtcgtcgcggccgaagaagcttctcagcaacataagcagcaaagcgcttttcggtcacaagaagaatagcacgaagcagctgcgaaccgtggaagagacacaacaagcacacaggtggg

SEQ ID NO: 9705 - DNA, 266 bp, Glycine max
  Clone ID: 701102795H1
gggaaatgtacatggtcgtgttgatgcagctaaagctttattgattggatctcacatggtacatgcataggctaaaatcaaaagatctctcaatatgccacaatatgatcctactgggatcttgtataatgaagccgaatgctacaaactgaaatgatgcttgcgctgtgacatggcccaactttaccgatgtatacccttttgcaccgattgaccaaaactaaaggttatcagcatatctggtattaggaaatgttcaacaattt

SEQ ID NO: 9706 - DNA, 271 bp, Glycine max
  Clone ID: 701102796H1
ctgttccatgctgttaaagcctccgttcacactctcacaccgattcaatttcagattttcctgtcaaactcgcattttccgggcacgaaactcgaggaattcgcgcatggcgcctcccatcctctccctcgctcttccctcaaacaccggtcgagttctcagcattcaatctcacaccgttcaggggtatgttggtaataaatccgctgtcttccctctgcaattactgggatatgatgtggatccaattaattctgtgcagttttcgaat

SEQ ID NO: 9707 - DNA, 279 bp, Glycine max
  unsure at all n locations
  Clone ID: 701102801H1
agaatggaaacaactcttcatcgaagcaggattcaaacactacaaaatatttcccatctttggttttagatctctgattgaggtctatccttgaacatttttatgatgtgtatgtcacacttaacgtttatatttatgaacatcctcagacatcgttgtaattgtatttagtggtttgcgtgttgtttgctgaataaagctatgatgacatagcattatcaacttctggtggaattacttatgtcntccccgctatgttgttaatgttcgtgtaggatt

SEQ ID NO: 9708 - DNA, 290 bp, Glycine max
  Clone ID: 701102802H1
tagtctgcgcatgtgcttgatgcttgggctcccatgggccccaaggggccggttcgcgaggaggccgggaagatcttgacggccaatctcaaggggaggccggcgtttgaggccgacgatcagtccgccttgatatacttgctgctgtccaagaaggagaagtggatggacaggacgtttcttgagaattcgttctacttgcacggttattgggccgggttggttgatcggtatgaggagatgattgagaagtatcacccagggttgggggatgagaggtcggcgtttgt

SEQ ID NO: 9709 - DNA, 288 bp, Glycine max
  Clone ID: 701102803H1
gaaacatttcactaatagagagacataagcataatattgagaaataatggagggttgtacttattgtgtgaagttgctatgccttgttgggtttgtggtgcttgtgagtactattgcaggggtggagagtgctggtgaatgtgggaaatctaccaccccagataatgaggcttataagcttgcaccatgtgcctcagcagcacaagatgagaatgctagtgtttctcagagttgctgtgctcaggtgaagaaaattgggcagaacccaagctgcctctgtgcagttct

SEQ ID NO: 9710 - DNA, 280 bp, Glycine max
  Clone ID: 701102805H1
gctctctcactcacaaacacacactgaactaaaaaacatcaaaagagacatggctgagcaaaccttcatcatgatcaagcctgatggcgtccaaagaggccttattggcgagatcattagcagatttgagaagaaaggtttctacttgaaaggttagcaaattgttactgtggaccgtccttttgctgagaagcactatgctgatttgtctgccaagcctttctttagtggtttggtggattacattatctctggcccgttgttgccagatctgggaggg

SEQ ID NO: 9711 - DNA, 282 bp, Glycine max
  Clone ID: 701102806H1
tcagcactcaaatcctctgagagaaaaaaaaattagggttttgcatttcgggtcagacagactcagacatgggaggaggcaatgcccagaagtcaaagatggttcgtgagacaaacctcgtgaatcataggaccatggctagcgaacgccggttgactccattgtacgtgtgcatgactaattactagcaggcgcgtttgcccataagatcattcttgagataggtacttataagggtgatgatggcaaagctttcaatcctcaaagcgatcgccaggcaga

SEQ ID NO: 9712 - DNA, 288 bp, Glycine max
  Clone ID: 701102807H1
tcagtgaaagagaatccgaggcgaagagaagagaaaaattaagatggaggggaaggagcaggatgtgtcgctgggagcgaacaagttcccggagagacagccgattgggacggcggcgcagagccaagacgacggcaaggactaccaggagccggcgccggcgccactttgacccgacggagtttacgtcatggtcctgttacagagcagggatagcagagtttgtggccacttttctgtatctatacatcactgtcttaaccgtcatgggagtcgtcggggctaagt

SEQ ID NO: 9713 - DNA, 288 bp, Glycine max
  Clone ID: 701102808H1
taaacatctttcactatctatcttcttttcatcatcttatcagatcaactctaatcctattttacatattcatatctatcttactactctcatattttcaatttgaggctcacgcacgaatgattaatgatttgagcatttgagagtgatcattctatggagaataataagatgatgggtgttaagaaagaggactatgctgccaatataggatcttcatccctcccttcttgtaataattatccattctctgatttctctgaagataatggctctttagggtttatg

SEQ ID NO: 9714 - DNA, 286 bp, Glycine max
  Clone ID: 701102809H1
aaataacactaacagtcaaagtgaagaacatgcaaatgaagaagacattgtaaatgaaaaacataagagacgtgaaaagaagaaagcaaaggaggagagggagaagcaaataagggctgctgaggaaagattactggaggatgatgtccctagaactgctgatgagtttgaaaagctgattagaagctctcctaatagcagtttcacctggataaaatatatggatttcatggtttctatggttgatgttgagaaagcccgctcaattgccgaaagggctttgagg

SEQ ID NO: 9715 - DNA, 276 bp, Glycine max
  Clone ID: 701102810H1
cgtttcttcaatggtttctggatccgaagaagaactggttcgccgctcagcacatgaaatccctctccagacggcttcgcaaatacgggctccgatatgacgatttgtacgatccttactacgatctagatgtgaaggaggcgctgaatcggcttccgacagaggtggtggacgctcgccacgcgcgtcttaaacgcgccatcgatctttccatgaagcacgagtacctccctgacaatcttcaggcaatgcatacaccattcaggggctaccttc

SEQ ID NO: 9716 - DNA, 282 bp, Glycine max
  Clone ID: 701102811H1
aatcactgcagcttctaatgttatcgatcaattctctttacaatctcagcctccgcaacttgttcatctctctcagctccacaatcaccaccaacaacaaaataatgtggtgtccactggccttcgcttatccttcgatgaccaacactttcaacaacaacaaagactccaacttcatcaaaatgaatctcaacaacataggtcccactcttctgctttcttatctctattatcccaaggcttgggttctcaaatcaaacaacagcgcgatgagattgatca

SEQ ID NO: 9717 - DNA, 277 bp, Glycine max
  Clone ID: 701102812H1
aatatgtccaaaattgaacacactcagcattgaagcaccgtttatggtttcacttgagttgaaaggatgtggtgtactatctgaagcattcattaattgtccactcctaacatctctcgatgcttccttttgcagccaactaacagatggttgcttgtctgcaacaactgtctcatgcccactgatcgaatcattgatattgatgtcatgctcttcaattggttcagatggtcttcgatctctgtattgtcttccaaatttgattgttcttgactta

SEQ ID NO: 9718 - DNA, 281 bp, Glycine max
  Clone ID: 701102814H1
atcgcaacgagattctccaagctctgcatccctcggcgatgccgtccacaacctactgtcttgaaggagaacaaattaaatctccttcaattatgaaacaggatgttgcacaagataacaccaactcatattcaaagaattcaatcccaccctacatgaaggctcatctctggctcacttggagggattatggaggcttcctgcctgcagcccattgatgtgatcaagaccagattgcagcttgataggtcagggaattacaagggaatactgcattgtgg

SEQ ID NO: 9719 - DNA, 257 bp, Glycine max
  Clone ID: 701102815H1
gtgcatatgctggattctcaatgatgaacatttagggtctatattttgaccctaggaaagttgcttcatgaagctttttcagttgtataagcaggatatggaccaccagtccgtaaaggatcttggctgctgatcctctcctttttatttccctccatggatgtaggtatatgcaagtggattcatgtaaactctcgctttgctatgtttgtgagttgtgacgaatatgttacttggtagacacaacagacatcacg

SEQ ID NO: 9720 - DNA, 291 bp, Glycine max
  Clone ID: 701102816H1
cggatcgagctccaatagtgttgttgatgatcttgtgcagcaatgtcgcacgacgaggtggttctgttggatgcatggggaagcatgtttgggatgagggcatggattgcattggaagaaaagggtgttaagtatgaacacaagatggaggatctcaacaacaagagctctttgcttatgcagatgaaccctatttacaagcaaattccagttctcatccataatggcaaaccaatttctgaatctgcaattatagtgcagtacatttatgaggtctggaatgacaacaaa

SEQ ID NO: 9721 - DNA, 293 bp, Glycine max
  Clone ID: 701102817H1
cagtattcggctcgatcgaagaaatagaaaaaaaaaatgttgcagcttctgtacgcggtgatattcggggaaatgttcgtgatcgcgagcttcctcttcaaaactccggcgaggaagctggtcatcatcacattggatcgggtcaagcgcggtcgcggccccgtcgtcgtcaagaccgtcgccgccacgctgctggtggttctcgcttcctcgctctacagcatcgccaagatccggcgtcggaacctcgacgctccgtcgttaaccccaccgacaagtactcgtgtcaagca

SEQ ID NO: 9722 - DNA, 283 bp, Glycine max
  Clone ID: 701102818H1
ggctcgagattgctttctcttttcagttctcttcttttctctcttggcgacaccactgcaacactttccttttctattctcagagcgtttttagtgtttttcaagcaagcgagtacggtaccattctattctactccctcacgtacgtgcacattctctctctctctctctctctctctctctttttctgtgttttgtggtggcttataattaggaaactactgcaaaaggaaacttttttgctgaattttcacagtcccaacagttttttaaaaggtttttc

SEQ ID NO: 9723 - DNA, 288 bp, Glycine max
  Clone ID: 701102819H1
gggttcgaaggggaagaagaaaggttcaccggaagacattctggaaaccctaggagacttcacgagcaaagagaactgggacaagttcttcacccttcgcggtgattccttcgagtggtacgccgaatggcccaacctcagggacccactcctctccctcctcaaaaccgttcctctcccgcttcagctcctcgtccccggctgcggcaactcccgcctctccgagcacctctacgacgccggccacaccgccatcaccaacatcgacttctccaaggtcgtcatctc

SEQ ID NO: 9724 - DNA, 275 bp, Glycine max
  Clone ID: 701102820H1
cgcattgcacaagcactctctctttcccttaccctttttcaggtttcaacgctccaactatccatggcaaaccgctggctcagacccgaggtgtatccactgttcgctgcggttggtgctgctgttgggatctgtggattccaactggttcgttctatctgcatcaaccctgaagtcagggtgaacaaggagggaaggaaggcaggagttttggagaactttgctgagggagagaatatgccgagcattcctggcgacatatgtgcgcaacagaa

SEQ ID NO: 9725 - DNA, 280 bp, Glycine max
  Clone ID: 701102821H1
ataattcaattttgagcactaaccagcaccacttccaatggcttcaaatcatgaagaagtgatacttttgggcaagtgggccagcccatttagcaacagagtagaccttgctctcaagctcaagggagttccctacatatactcggaggaagatcttgctaacaagagtgctgatcttctcaggtacaaccccgtgcacaagaaggttccggttatggtccacaatgggtacccattacccgagtcacttatcagtgttgactacatcgatgagacatgg

SEQ ID NO: 9726 - DNA, 157 bp, Glycine max
  Clone ID: 701102822H1
ggttgagaaatgagaatcagaatccaaaacagaagccaccatctaaaaccccgcgtggtgaaaatccaaaaatgttcctgttccagaagggttctcatctccatcgtctccttctgtcaaagaagtactactaccattttccgcttccacacaacat

SEQ ID NO: 9727 - DNA, 277 bp, Glycine max
  unsure at all n locations
  Clone ID: 701102823H1
caggatttgaggtgctggagagaagggataaaagtgtatggtatgggggcgtggtgaccgagggctcgaaaggaggaaacttttggctacagaaagtagtttctttagtcgggtttctttcaaaaaatggtgcagagtctctgtttgatggcttctcatggttaccctcctggccttgtcttgcatccacaagtactgggcttgcctgcagtaccatgaagggctaccanacattctttccttctccagtagcaaaagcagacctgatcagatatca

SEQ ID NO: 9728 - DNA, 283 bp, Glycine max
  Clone ID: 701102824H1
caagaacattgactttggggttgatttagactctagggttgcactggttggacccaatggtgctgggaagagtacactactgaagctaatgacaggtgacttgatgcctagtgacggcatggtaaggcgtcataatcatcttcgaattgcacaatatcaccagcatttggcagaaaagctagacatggaaatgtctgctctacagtttatgattaaagaataccccggtaatgaggaagagaagatgaggggggcaattgggaagtttgggctgtcaggaaaa

SEQ ID NO: 9729 - DNA, 280 bp, Glycine max
  Clone ID: 701102825H1
caaagccttcctagaacgaaaaaaaaaagaagagcaattttccctcaccaaagaagaagaagcaaacaatggccgatcaacttaccgatgaacagatctccgagttcaaggaagccttcagcttgttcgacaaggacggcgatggttgcatcacaaccaaggagcttggaactgttatgcgttcattggggcaaaacccaactgaggcagagctccaggacatgatcaatgaagtggatgctgatgggaatggtaccattgacttccctgagttcctaaa

SEQ ID NO: 9730 - DNA, 277 bp, Glycine max
  Clone ID: 701102827H1
ccggaaatatcgaggttgtatttgttgcatgggggagaatataactcaacatttcgatccgggaaagatagattacatacacacacttaaatgtttctggttagatctcctgaaccttaagaacaatccataccaaaacgttaacatgttcgctttttttccttacacttctattgtcaaggcctgcaagtattaatgttaatatttaaagcctttttaagttttttttttgaataaattttaaccatggagttcctctatctccataatgcatgca

SEQ ID NO: 9731 - DNA, 277 bp, Glycine max
  Clone ID: 701102828H1
tctcaatctctcttcttacccatttcctccccccctctttctcttttcttgttctgtttttattttcactgttctctgataacaacgttgttagttgtcaccatggttgttctgtctcagccagcattaaaccagtttttccttctgaaaacatgcaagcccacgcccttgttcgcggggattcctgtggtcgacctcacggaccccgatgccaagacccacatagtcaatgcctgcagggacttcggcttcttcaagctcgtgaaccacggtgttc

SEQ ID NO: 9732 - DNA, 236 bp, Glycine max
  Clone ID: 701102830H1
gcactggccactgagtatagcagttactctcgccctaagcccaggcccgctcctgcaggcttcaatcacgccgccggatccgggtatggtatgaagcaggagtcggaatacggatccgggtatggaaggacggaagaaggagaatatcgggtcaggatatggtggaagaaaggaggaatcagaatacggatccgggtatggaatgaaggaagaaggtgaatatgggtccgggtatg

SEQ ID NO: 9733 - DNA, 277 bp, Glycine max
  Clone ID: 701102831H1
ctcgagcgctttggcatgcccttcacaatgcagagataatctctccctcttccctctacatattcttcgcttttttccgaatagccataggtcaaaataatctgtgaacgacttcacctgacaaaatggctcaagccatatatactagaatagataataataataagcgaccgtcgagttactgttcaacagtgactattgtcgtgtttgtagctctttgcttgtctggcgtttggcagatgacatcgtcatctgttacgcccgtgcaaaatgtaga

SEQ ID NO: 9734 - DNA, 275 bp, Glycine max
  Clone ID: 701102832H1
tgctcattttctctcatcttcagtggatctcaaaaacagtgacaagggtaactacatcactgcatctgatcttcaagctacatattcactctaccctggaagtcctgccagtagccttatatctccaatatcaaggaactcgggtgactgtttatcatcttcttttcctgaacgagagttccgtccacagtgggattcatcactatctcccgagaatggaaagtatcagagaactgggtctgggagggtgtcagggcatgacacaaatggtgtca

SEQ ID NO: 9735 - DNA, 277 bp, Glycine max
  Clone ID: 701102833H1
cacttttcttcatagcactcaaaaaacaacaactcatctcatcattattccctttctcactcagcacattccccacagtagcaccatcaccaataataatggcatcatcctcatcaaccgttgctttgagaaccatctcctctttctctctgaaacctgccaccacaacaagatcattactcaacactagtacttcatccaccataaccctcttaccctttacatcagcaaactcatttctctccaaaccctcaactcaacactcttcccaacatct

SEQ ID NO: 9736 - DNA, 285 bp, Glycine max
  Clone ID: 701102834H1
ctcgagcctttcatcttggatttgtgttcaagtgtccgataccgagtgcattttatgcagtttttgatggccatggggggcctgatgcagcagcctttgttaagaggaatgacatgaggttgttttttgacgatgcagacatgctgcagtcgtatgatgctgatgcgttttttctacagaaattggaggattcccatcggagagcttttctacgggcagatcttgccttggctgttgaacaaactgttggtagttcttgtgggactactgcattgactgcccttg

SEQ ID NO: 9737 - DNA, 276 bp, Glycine max
  Clone ID: 701102835H1
gtcgcttgggagtgcagaaaggtgccaccttggactggagtgactacttctttctccattacaggcctccctcacttaggaaccaagctaagtggcttgcatttccacaatcctttaggaaagtgattgctgaatatggggaggaagtggttaagctaggaggaaggatactcaaaatgatgtcaataaaccttggcttgaaagaagatttccttctcaatgcatttgggggagagagtgagttggtgcatcctaagggtgaattctacccaagtg

SEQ ID NO: 9738 - DNA, 210 bp, Glycine max
  Clone ID: 701102836H1
tcgtacttcacagtagcattcctgtgcttattgtctgcaatgctagtttgtttacatgataaaatgagaatagttgcattgctagtttgttttatggttcacacatccagtcccatgtggcttttgcatattcagtatcacttgcgagcagaactttcttcctttggctatttatggtgtgaaaaatatggtagcttcttaacgggcttg

SEQ ID NO: 9739 - DNA, 283 bp, Glycine max
  Clone ID: 701102837H1
ctcgagccgttcaaattcccacacattcttataaacataacatactctctcttccaaagacgtttcactttaccaaaaaagctttccctttgagaaataaaacccaaaaccagtcttttgataattttgagcagttgcattccttgttttcctcctttttgggtcccctcaaaagtagtttcaaagagttcctcttcctccacagatatcatggcagatcaaaccccgggttcaggaaccgtttctgttgaagcttcttcacaagaaagaaggaaacttccca

SEQ ID NO: 9740 - DNA, 80 bp, Glycine max
  Clone ID: 701102838H1
tttgattggtaattgattttgagggtttgactattcatggagtatgatgttatgagaaaaacttcatgttacttatttca

SEQ ID NO: 9741 - DNA, 218 bp, Glycine max
  unsure at all n locations
  Clone ID: 701102839H1
cttacttatttattctccgaaaatggttgatttacattggaaatcaaagatgccaagttccgacatgccttccaaaactctaaaactctctctctccgacaacaagtccttaccctctttgcaactacccttccgcaccacagatatctctcacgccgcaccttctgtttcacgcattacgactantatctccgtcttcctcaactcagaaagctttg

SEQ ID NO: 9742 - DNA, 279 bp, Glycine max
  Clone ID: 701102840H1
taagtagcaagctagatactcaagcctatggtgatcatacctgtataatagcaaaagaacatttggagcctaacttaggtgggctcactgttgagcaggctatccaaaacaagaagttgttcatcttagatcaccatgactatctcattccttatttgaggaaaataaatgcaaataccacaaagacttatgctacaagaaccatatttttcttgaaagatgatggaactttgacaccattggccattgagttaagtaagccacatcctcagggtgaag

SEQ ID NO: 9743 - DNA, 279 bp, Glycine max
  Clone ID: 701102841H1
gcacaaagaggggttcctagacaagatcaaggacaagatccacggcgaggagggtggcgccaccgccgagggcgagaagaagaagaagaagaaggagaagaagaagcatgaacatggccatgacagcagcagcagcagtgacagtgattagattatctcccactgctgcatcacctatatatcttataaggtgtatgggaccatagtagtgagggctgtgtctttctctttttttcctacttgtcatttatatttatgagcgagagaaatagtgcgtgt

SEQ ID NO: 9744 - DNA, 274 bp, Glycine max
  Clone ID: 701102842H1
atcgagcgaatcggttcgagaataattcctttctaattaatattatttgttttcaataccttattacaaattctttcacattgtgcaatttggaattgaaatttgaacagatctggtgaattgaattgaattcgaaattgttgtcgtggttgctgctgctgcagctgcaaggaatgccgctgatattagcgaaaagcgattcgatccagattcgcgaggtgtggtacgataacctggaagaggagttcgcgttgattcgcgaaattgtggacaa

SEQ ID NO: 9745 - DNA, 227 bp, Glycine max
  Clone ID: 701102843H1
cggctcgagcaaaattgaaggaatctattcagaaaatagagaaatccatccgaaaaatgtaaccaatattgttgcctgcatatattatgtaacatactcttgagttttgagcatttttttttaatcattctctttcttgattttgcagttttcaacaagttattaaattcattgaaaaaatgtttgaaggatgtgttagatagtatattcctagcaatattacatgc

SEQ ID NO: 9746 - DNA, 275 bp, Glycine max
  Clone ID: 701102844H1
cttctttctttttctgtgagcctttctttcaggttcttaacttgcatcagtgtgcagtgtccaaatcataagggtagttgcaaattgcaatggctaagcatgatgttgagggtggttccttctctgcaaaggactaccatgatcctcctccagcaccgttgattgatgctgaggaactcacacagtggtccttctacagggctttgattgctgagttcattgccacaatgctcttcctttacatcacagtgctcactgtgattggttacaagagc

SEQ ID NO: 9747 - DNA, 276 bp, Glycine max
  Clone ID: 701102845H1
agagacgcaagcatgtagaacatgaacttgatttggtacagcaggagatcccggagtgcagaaaaaaatcggtggttgctgagcaagcaaaaacgcaagtactgcaggagctggatagcactaagaggctaatagaagaactaaaacttaacctagagagggcgcaaaccgaagagcgtcaggcaagacaggactcagaacttgcaaagcttagagtggaagagatggagcaaggtattgcagacgactctagcattgcagccagggcacagctgg

SEQ ID NO: 9748 - DNA, 205 bp, Glycine max
  Clone ID: 701102846H1
atgaatactataatataatatgcgaagtattgaaccaattaatggtgagcttcgttggtctctcgtccgtgttgtaatgatggatcgggtactagctagttctgcagttccactgtgttgtaatgtctggttttgtttgaagtgcttataagcatgattaatttgctgtgttctgcagtagatgaatgaatctgatgtgcttatt

SEQ ID NO: 9749 - DNA, 275 bp, Glycine max
  Clone ID: 701102847H1
caattgagggcaccaaaaaagaagcagcttcaggctacaaaactgagcgtggaaggtcgtggtatgatcaaatatttataaatgtgaccacgttgatactggatgggtttgtttgtcctgctgcaagcttttcatataatgtgctgcctgcattgatgtggattcttctaaaggtgggctattcgttcagtgatctacatggaaatttgatggagagggatgttatgaaaataccatccgtatgctgcatttgtgtattcatctagtgcagtagg

SEQ ID NO: 9750 - DNA, 279 bp, Glycine max
  Clone ID: 701102848H1
tctttctctttctcactcactctcactctctgtcacggacagacagagaaaaactcagacacccacgtttccacttccctcacaccatcccttactgttccttcttcttcttcttccttttttttttcctcctaatggaatgatggaacacaacatcatcgttaacaacaacaacgtgatcgcaccgtttgtcataaaaacctacaacatggtgaacgttcccaccaccgataaactcatcatgtggggcccagccaacaacagcttcatcgtcctcga

SEQ ID NO: 9751 - DNA, 242 bp, Glycine max
  Clone ID: 701102849H1
ctcgagcgaagacatagagaacaacaatgttgcaccttctgtacgcggtgatattcggggtaatgctcgtgatcgcgagctctcctcttcaaaactccggcgaagaagctcggtcatcatcacattggatcgggtcaaccacggtcgcgagcaccgtcgtcgtcaagaccgtcgccgccactctgctgatggttctcgcttcctcgctctacagcatcgccaagatccggcgttggaacctc

SEQ ID NO: 9752 - DNA, 274 bp, Glycine max
  Clone ID: 701102850H1
atccatctttgccttctgcatgttggttctctgtaaacagatactgcaaaagaagaataatattgaatatttggttgggttgaatccctgggttgaagcgttgcagacatcacggctattctaagagtgtctcgctctctcattcatgtcccaactgtacgacggaggacaggttgcgtaactgccaccaacccgtcgccgcacggtgggcgtggtgctttgccttctgaaggtggtagcccttcagacttgctcttcttagctggtggtggtt

SEQ ID NO: 9753 - DNA, 279 bp, Glycine max
  Clone ID: 701102851H1
gcgctgctcaatttgtccatttttgacaagaacaaaagtaggattatggacgaggaagggtgtctaggatcgattgttgatgtgttgagatttggacacaccacagaggcaaaggaaaatgctgctgcgacgttgttcagtctatcggccgtccatgactataagaaaataattgcagatgagatgcgagcagtcgaggccctcgcaggactgttgcaagaggggactccaagaggaaagaaggatgctgtgacagctttgttcaatctttccacacac

SEQ ID NO: 9754 - DNA, 239 bp, Glycine max
  Clone ID: 701102852H1
ctcgagccgtttttataaattttcatatgtttgatttaaaatttactcataacttaatttttcaatagaatatttaaacataaatcttattacttcataatctattttccaaaattaattctattaaaatcaaaattttcagccttgaacaacaaagctaagtaagttttttcctgtgtttattgttcgtttaaatgtatcagttttggagtaccatcctggtggagagaagtttccag

SEQ ID NO: 9755 - DNA, 278 bp, Glycine max
  Clone ID: 701102853H1
gctacatagtttttctgtttgaagtgctacaaacaatggcagctactcaggaagatgtgacgcttttgggagttgttggaagcccgtttgtgtgcagggtccagattgccctcaaattgaagggaattgaatgcaaatttttggaagaaaatttggcaaacaagagtgatctacttctcaaatccaaccccgtttacaagaaggttccagtgtttattcataatgagaagcccatagcagagtctcttgtgattgttgagtacattgatgagacatgg

SEQ ID NO: 9756 - DNA, 277 bp, Glycine max
  Clone ID: 701102854H1
ggatgcacttgatcgaccttcagatagctcccaacaccaactcatgtagaatattgggaggcactccttgtgcgttgtgattgggagctagctgaagctcaaagaaaggatgcacttgatcgagctagggtgcgtggagaagaacctcctgatgaaagaattgcagaagaaaggggtctacattgcagtgttgagccagatgtgaagaggcttttgcaggggaagacacttgcagagttggaggctttacgggtcacatgaatcagaaagcgtatgg

SEQ ID NO: 9757 - DNA, 278 bp, Glycine max
  Clone ID: 701102855H1
cgaaaccaaagcatgaagatgaattgctactggtggcatgccctgataatgagtggttgtgtgttgggcttgtgcgtgggcataggaggttgtgtatgtgtggtggagaacgagaatggaagaatcatcattgatattagtcacaggtaccatcctgatatgcctgcctgggaatccaaggatagccttgggcagtttttgtggcttacaagaagcatggccaatggttctctggctaacttctcccaattcaagctccccgctcacagcggcaccca

SEQ ID NO: 9758 - DNA, 278 bp, Glycine max
  Clone ID: 701102856H1
gttcttcgtgttctccattccctctctcactccttcatctacttcacatattatatcatcacatatcatagtgatatcatatcacaatgtgtggcatacttgctgtgcttggttgctctgattcatctcaagccaaaagggtccgcgtccttgagctttctcgcagattgaagcaccgtggtcctgactggagtgggctccaccaatatggtgataactatttggctcatcaacggttagccatagttgatccagcttctggtgatcaacccctcttc

SEQ ID NO: 9759 - DNA, 220 bp, Glycine max
  Clone ID: 701102857H1
cggcacgagtgctactattcaggcttctcttcagtcagatgcatctgaccttagtatgctagagattcaaaatgctcaaggactatctgatgtattgattgaaatgcttagcgccttgagtcgtaaagaccgtgagggtgtgaaggaggaagtgattgttgatcttgttgaccagtgccgttcataccaaaagcgtgtcatgcatcttgtgatcaatact

SEQ ID NO: 9760 - DNA, 274 bp, Glycine max
  Clone ID: 701102858H1
gtctaacattattgtttcctaccaagttctctgtctggggagttcctagcaccaccaccagcttctgcagtagctttaagctacgaaagattttccttgaccatggggcaaaagcatttagtgacggtgtacagtttatgggctttaacatgttcccttcttccatctttctcctttggaattctgagaattggtttgaagaagagacctctagatcttgatagtattaatgctgctagaaaggcaagagaaggtctaagatctgtaagaccaa

SEQ ID NO: 9761 - DNA, 272 bp, Glycine max
  Clone ID: 701102859H1
gtttctttgtttgcagcccttggctttcttctctacggtggaagactattcttgatgctgcaacgctttcctgtggaatccaaaggtcgacgcaagaagctacaagaggtctgtattctgttttactaagaaatttttctgtatttatctgctcttcacctcactcctccccttgctttacccagagttaatctacctgatctttctactgcaggttggctatgtgactaccatatgcttttcatgcttccttatcagatgtgtcatgatgt

SEQ ID NO: 9762 - DNA, 274 bp, Glycine max
  Clone ID: 701102860H1
cttgctccctcagatgcgaagaagaagccacagagaactagtctcctactctcacccgcaagacaaaaatggcatctcacatcgttggatacccccgtatgggtcccaagagagagctcaagttcgctctcgagtctttctgggatggcaagagcagcgccgaggatttgcagaaggtgtcttctgatctcagggcatccatctggaagcagatggctgatgctgggatcaagtacatccccagcaacactttctctcactatgaccaggttct

SEQ ID NO: 9763 - DNA, 270 bp, Glycine max
  Clone ID: 701102861H1
cctcgagccgaatcggctcgaggtttgttacctcactttgttttacttctctgcagtaatactaaaaaaagaaagaaagaacgaagaagaagaagaagaagaagaagatgttgagggttgcagctagaaggctctcttctctctcctcctcctctccgtggcggaccaaccacgccgcttccgcttatgtctctcgaaacgcatcgttgatgaccgcagatccgatccttcctcccatccctttttccctcagaggttttgctatgaatc

SEQ ID NO: 9764 - DNA, 273 bp, Glycine max
  Clone ID: 701102862H1
atcataagacaagcaacgctaaggctaacggtaacggtaacagcggggtgaaggaggtgcattttcgtggagtgagaaagaggccgtgggggagatacgccgcggagatcagagatcccggcaagaagagccgcgtctggctcggaaccttcgacacggcggaggaggcagcgcgtgcctacgacgccgcagcacgagagtttcgcggccctaaggccaagacaaacttccctctccctttggaaaatgttaagaactcgagccccagccaga

SEQ ID NO: 9765 - DNA, 273 bp, Glycine max
  Clone ID: 701102863H1
ccaaggtgaagcaccgataccggacctatctccggcgaatccccagtccccactttcttccttcgaaatgaatcccgagtatgattatctgttcaagctccttcttattggagactctggtgttggtaaatcatgccttcttctgagattttctgatgattcgtacatcgaaagctacataagcaccattggagttgattttaaaatacgtaccgttgagcaagatggaaagaccattaaactacagatctgggacacagctgggcaagaacg

SEQ ID NO: 9766 - DNA, 302 bp, Glycine max
  Clone ID: 701102864H1
gcagaatcgcggctccagctcactggtggtcagatcttggagtaagacttcaattcatatacaccatagacacatactatcttcataagcaaaggactcaaagtaatagttttctacaaaaaaattgaagtttggggggggatctacatctctatgggattatcactttccttactctcatcagcctgggaagaaatcgttagacattcactatttggtctgtctttgaacttcacttttggttccaaagatggggctatgattttgagatcaggtagcttcaagataagagaatcagaaac

SEQ ID NO: 9767 - DNA, 300 bp, Glycine max
  Clone ID: 701102865H1
tcggcattcggctcgatctcaagtccaacctacccctttttcttctcccaccaacttcaccgtcttcttcctcgatcatgtctcacttcaagggcaagtaccatgatgagcttattgccaatgctgcttacattggcactcctggaaagggtattcttgctgctgatgagtcaacagggacaattggcaagcgtttggccagcatcagtgtagagaatgttgaatccaacaggcgtgctcttagggagctgcttttcaccgctcccggtgctcttaaatatctcagtggtgtcatcctct

SEQ ID NO: 9768 - DNA, 279 bp, Glycine max
  Clone ID: 701102866H1
tgaacattgaacaactcttcacacaacaaaacttttttctggcattgtagcatcatgactggcagagaaatcctccatatgatgaaggtgaaagcagggtttggaacaccagacacagggaatggaaaaggcaaaatatcaaaacacattacacatggctttcacttgatgaagggcaaatcagcgcatcctatggaagattatttagtttcagaatttaagcaagacaaggacagagaattaggcttgtttgcaatatttgatggccacttaggccat

SEQ ID NO: 9769 - DNA, 277 bp, Glycine max
  Clone ID: 701102867H1
ggaggcgcctctgttattatcggagaagagaactggatcgattgaagaagagagtggaaaatggagctcgtatcagtatgtgggtggaaccggttctgtgaggccaacttcttcattggctggaactgaggtgagtgtggatgaaattcgatctgctgctgctgcttctggttactatcccccttcccttcatggagccttggttggttcacctgagcctgatcctacagagcaagctcttgtttatcagggtggatatggaggagattatggtgga

SEQ ID NO: 9770 - DNA, 206 bp, Glycine max
  Clone ID: 701102868H1
atgatatcaattctccatcaacaatgaagtgatggatttatgttcactatgtaagggctcatacacatgacatcagggccctagctgttgctgtaccgctaagtcacgaatatattaagccagaaaagaggattaactgagctctacgtgcagaaactcccattagtttccgttaccataagtaggctctttgggaggttcctatg

SEQ ID NO: 9771 - DNA, 276 bp, Glycine max
  Clone ID: 701102869H1
ggtgagttttataccattagacttaaggacggaaaaaaggtacactcttatgtcttttccttgaattttctagctacctgttcatttattgaataatcttatactgcgggcatataagggatataattttgctcctggctgtgattcttattgggtatgtgacagtgatgatgctgatatattaaaatcgaatggtatgaactgaagcaagcgaaaattatttttaccaaaaatgaaaaatataatatggaataaattaaactgttaaagttgatg

SEQ ID NO: 9772 - DNA, 275 bp, Glycine max
  Clone ID: 701102870H1
gtacaccgtggctgcggcggctccggttccgttaccggcgccggaggttggattaggagcgttgaatttgaatgcggagtttatggcggtgatgcatgagatgataaggaaggaggtgaggaactacatggagcagcagaatgggatgatgtgagatcagggtatggaaatgatggaagggtttaggaacgtgtcggtgaagagaattgggattagcagggtggattcgtaattattattattattattattattatgacctaattagtgttttc

SEQ ID NO: 9773 - DNA, 276 bp, Glycine max
  Clone ID: 701102871H1
ttgccacccagttttgaatatatttttattccttctttgtttcttcactttcttccatacacataaccatgtcttctcagactgttgtcctcaaagttggtatgtcatgtcaagggtgtgctggagcagtgaacagggttttgggaaaaatggaagttcctgttgggctgcgattatataattatgtggttttcttgttcacaattaacttttggacaccatcaagaataccctgcacaagtgaagtgctgttatggtgggttacttcttattaaa

SEQ ID NO: 9774 - DNA, 276 bp, Glycine max
  Clone ID: 701102872H1
gtcagaattgaaggggaaggttgtcctcctctacttctcagctcactggtgtcctccatgccgtgcattccttccaaaacttattgatgcatataataagattaaggaaaagggcaatgcattagaagttgttttcatctcaagtgacagagatcaaacctcctttgatgaattctttgcgggaatgccatggttggcacttccctttggggactcgaggaagaaattcctgagtcgcaaattcagggtatctggcatccccatgcttgtggccat

SEQ ID NO: 9775 - DNA, 274 bp, Glycine max
  Clone ID: 701102873H1
ataattatgatccagtggtgattaatgttacacgccctctcttcctttctctcgctctcattgtctgtccttgccacagaaaccctgatggaaaccccaacaaacgggatttgtattgcatttgagctctgttgtagtacctgaaaaccttaatcatcttatggagacctacaacaatcaacagcagcagaagaagaagtggtttatgccactggttctgtctctactactgtccaccctgctcatacttttgtccatcttcgtctcctccgat

SEQ ID NO: 9776 - DNA, 270 bp, Glycine max
  Clone ID: 701102874H1
gtgtaaaataataataatttttatccgggcaaatggtgactgcattcctaattgtacaaaactacaaaggaagaaagtctttggaagtggaatggacccggtgagatagctgttacagggtgctatgagaagcacgtgtcatttacttttttttttaatctttctttgcacataataagctcagtttggttcttcctttgttcttggtattttcaattttatttttcttgtagttgcagttaccgattttaacaacataacaaatggcac

SEQ ID NO: 9777 - DNA, 271 bp, Glycine max
  Clone ID: 701102875H1
ggatacgaaacccacatcacaatccaattccatgaccctttgtatggctgcagaaaatatgagcgaggtggaagaggagcatggatatgtcttcaaagaagagatccatctcacggtgttcaaaacttctctgttcttcgcgggcgatggcttcaccgtctacgattgcaaaggtcaacttgtgttcagagttgactcttatgggcccgacacccgcgacagagacgaactcgttctcatggatcctaacggacgttgtctcctcaccgtt

SEQ ID NO: 9778 - DNA, 165 bp, Glycine max
  Clone ID: 701102876H1
attaaatttttcttctctcccttctttctctctctctctctctgaccattctcttcttcttctttttcttctcctctctctctctcccctccgccatggctgaggataaggagatgtctatccctgtcatcaatgggaatgattccctaaatggggaaaatcata

SEQ ID NO: 9779 - DNA, 268 bp, Glycine max
  Clone ID: 701102877H1
attttgggcatccttaagaaaataggaagagacacggttaaggttggggagaagcaaaagtcagtgatagctttggatgggggattgtttgaacactacaccaaatttagagaatgcttggagggtaccctgaaggaattgctgggagatgaggctgctgagaccattgtcattgagcatgctaatgatggctctggcattggtgcagccctcctggcagcttctcactcccaatatttgggagtggaggagtcttaaattttattgc

SEQ ID NO: 9780 - DNA, 252 bp, Glycine max
  Clone ID: 701102878H1
tttcatctttgtcatccacttaacccaggtgtataaatgtcagcattgaacatgcccactatgagacttccaagagcttccttgtctggaacaacaccagctatgagattcatgtgctcttacaaagagtccatcatcttggaggtctgtgaagattgtgtctaaagtgtttggattgaaatcatcttcctttagagtgtcagcaatggcggtatataaagtgaagctgattggaccggacggtgaagagat

SEQ ID NO: 9781 - DNA, 266 bp, Glycine max
  Clone ID: 701102879H1
cggaaacagttttcgtcgttcattcatcagctgttctcttcgtttttctgcctacaatggatgagaattcagctacatatggaacccatgaggtggttttagatgtaaacagggacgtctctagaacaactcaagcttcacgctcttgtgtcaatgtttctttcttgcagaagttggtagctgaggtggtaggcacgtatttcttgatatttgcagggagtgcttctgtggtggtgaacagaacaacaaaacgttgtaacacttct

SEQ ID NO: 9782 - DNA, 293 bp, Glycine max
  Clone ID: 701102881H1
gtggtcgtcgcatgtgcttagtatgttttgaagattttgattgtatgtgtcatcagttattccattatgcttgaatccttgattcctattgaagttgatagctctctaacttgaaatctacttttttctttgcctagttgagcagtagtcaattgccaatacttgtgttgacagatgttttcactaaaattgtgttttcttaatgttgtaataataactagtattgtcactaaaaatgattttgactatctgactatgttagttgattcttagtgttagtaattaatttattg

SEQ ID NO: 9783 - DNA, 267 bp, Glycine max
  Clone ID: 701102882H1
acgctttacaaccctacgatgatgagtcagcattcccgtaggaggctgccacgtggcaatccaagaaaggccaagcgtgacgaagttgacaagcaggctgcgcccaaagccgccgagccggcaccatcctcgaatcggcttctagccggctatcttgcgcacgagttcttaaccagaggaactctgttgggtcagaagtttgagctggacttggaccgagccggcttggctgggtccagctcagcagaagctcaccgtggagcgaga

SEQ ID NO: 9784 - DNA, 266 bp, Glycine max
  Clone ID: 701102883H1
caaagacacattctttcagcctcccttcaacacccttttggcccttcattcttccaagtctcaaatcgaagctcgaagacctgcgaagaacaaagggttgtttaaattctgtgtggttgttgttggaggttgaaatacaagttgccgcctcaagtgtgtgttaatcttaaatttcacaagcaagttgtatttttggagtattgtattatatgaccaaatattttagtgttttaggactagatattttgcttctggtggcaattttt

SEQ ID NO: 9785 - DNA, 139 bp, Glycine max
  Clone ID: 701102884H1
gtccaatttcctttcctttcctttctctccattggacactgcctcttgtctctctcaattggcttttcttcccttttcctttattggggcagcctctctgcaatccacagataacttagattcattccacacaacataa

SEQ ID NO: 9786 - DNA, 273 bp, Glycine max
  Clone ID: 701102885H1
caacattttactgggtatataagtggagagtgtaactgaaattatgtggaggtgcatcaatggaagaattgccagaagatttttatccacttcttctgccagtgcccgtggttggtgggaccatgtaaggccagcaccgaaggaccccattgttcgtgtgaacgaggcatttctagctgacccttttccccataagatcaatcttggaataggtacttataagggtgatgatggcaaagctttcattcctcaaagcgttcgtgaggcagaaac

SEQ ID NO: 9787 - DNA, 275 bp, Glycine max
  Clone ID: 701102886H1
aatgttacatgagaaggacatgaattcacgagttttctatggaaacgattccatttatgtgctgcttagacttcatcagacattgtatgagaggatacaatcagcaaagattaactcatcatctgctgataggaaatggaaggcttcaagtgatacaagctccaccgatcaatatgacaggttcatgaatgccctttacagtttgctggatggttcttctgataatacaaaatttgaggatgattgtcgagctataattggaattcaatcatatg

SEQ ID NO: 9788 - DNA, 273 bp, Glycine max
  Clone ID: 701102887H1
agaatatctatctctcattctctcgtgcctcaacgcttttttaactcctttcgcttttccattccaacctctttcacacttcagatctgtttcttcatcggttgttcaagtaaatcgcctttgtcaccactgctgaagtgtgtgatgcgaacccacagttaattttgagtggggagcttcgtgcccttcagccagtttttcagatttatggccgtcgacaggttttctctggacctatagttaccttgaaggtgtttgaagacaatgttttgg

SEQ ID NO: 9789 - DNA, 273 bp, Glycine max
  Clone ID: 701102888H1
cttcttgattatactctgcgaaataatttttgcgtttcattgtcttataattagcatggcctttgccgcagttaaagtgttcatgatattggggcttttagccaccgcgtgtgtagcacaagcccctggacctgcacccacgcaaccaccatcaacaaccccatcaccgtccacgtcagcacccgccccatcaccaaccgcaaacacccctcctcctgcggctgcacctgcacccgcaacaccacacccacaccgctccttcatctccaactc

SEQ ID NO: 9790 - DNA, 269 bp, Glycine max
  Clone ID: 701102889H1
ccctagtctccatacatcaacttgggaggttaaagagacggcaacgttgtgctgtccgccttgaccgagccagagcttcgtcttggccctcgattttgccctgtaaaactaatcccagtcacaacagaaataatcaatggcaccgaaacagaccaaggctgagaagaagatcgcttacgatgcgaagctgtgcgacctaatggaggagtacggccaaatcctcgttgtcaactccgacaacgtgggatcgaaccagctccagaacattc

SEQ ID NO: 9791 - DNA, 268 bp, Glycine max
  Clone ID: 701102891H1
gcgtggttgattccggtaatggtttaaaatacacgaacttattcgacgctcaaatcgacgccgttttcgctgccatgtcagcactcaaatacgacgacgttaagatcgcggtttcggaaacgggttggccttctgctggggactctaacgagattggagccagccccgacaatgcggcgtcgtataacggaaacttggttaaacgcgtgttgagtgggagtgggacccccttgaagcaaaatgagtcactcgatgttttcctcttcgc

SEQ ID NO: 9792 - DNA, 263 bp, Glycine max
  Clone ID: 701102892H1
atttgcaatcaattcaatcatatatcagaggatgaagattgttgtgatgctattgctaccgcccttgatgtttgcactgtttttttcatgcacgagttcattggcagtatccacaaatacaagtaccacatgccccatggacttgaattacgttctgagaatcccatggaacacttctgcctgccataacttccaacaaactctggcggctaaaaacggaaccgacgctaacacatgttgcatctctctcttgtccctcttcg

SEQ ID NO: 9793 - DNA, 269 bp, Glycine max
  Clone ID: 701102893H1
gcgccacccaaatctgtttcaacgcaagagaaacaacaagagaggagcaagcaggcacatgctgtcaccaccccacgatctaaaagaagaaagaaccagcttaagaaagtttgtcaagtgccagttgagaatctctcctcagacatatgggcatggaggcaatatggccagaaacccataaaggggtctccatatccaagggggtactatagatgtagcagctcaaaggggtgtttggcaaggaaacaggttgaaagaaacagatcaga

SEQ ID NO: 9794 - DNA, 261 bp, Glycine max
  Clone ID: 701102894H1
ctcagatctgatttcgcacaattttatgcttgtgatatctccccttctctcattatcattgctcgcacgatgatagatatgccatgagagataatagggcagatctgatgatcgtttagcaaagatcattataatttgaatttcagctgggttcatgaagcaatatgaagaaccaacacggttacgtgccagcgcttacatacctttggggccgtcggattcagaggcagtggatgtctctctgcttcagcgctctagtac

SEQ ID NO: 9795 - DNA, 188 bp, Glycine max
  Clone ID: 701102895H1
gtttcttcttctgcaggaccaaattgatatacaagatcattgttttagagagagagagagagatagagagagagagagagtatactgtttgggtcacagactacttctctgagcagatctagatatatctcggctgcttatgcgcataaccccttgagacgcagatcgagagacacatgagcaccagt

SEQ ID NO: 9796 - DNA, 274 bp, Glycine max
  Clone ID: 701102896H1
cctgcagttagcctcacaaacccagaacatcccccgttgttcaaaaggattgtagtagaggagtatatcaaagattacttcactcataataagttgaatggaaagtcctacttggagcatatgaggatcacagacgatgaaaaatttaccaacgcctctatctagcacctgcaacacacacacatatatatatatagtgaagggttgctaacttgttatataggtatatatgtgtgtgttgcacaatgtcagtgaaagtaaaatgtgttgggga

SEQ ID NO: 9797 - DNA, 270 bp, Glycine max
  Clone ID: 701102901H1
ctcccagccccaaggtgtgtttgtcttgcagatccaacacgcctcaaccacactctctctatttatatccaactgtcccatcctcactcgcaacccttttccccttttatcaattcaaaccacgccttcccctgttcacaacctagcttgcccacaccaccatcacaacacaaaccattcctctcttgcatttaaacaagaataaatatagattctgggggcatttcctggattctggttctcgttggtcactccatcaaacaccctttg

SEQ ID NO: 9798 - DNA, 263 bp, Glycine max
  Clone ID: 701102902H1
gtcgacgtccatgatttggttttcttcctctacattcaatcctacaagagcgtcctcccgcgcatccataaggactccgccgccgtcaccgacgtctggccttccacctccgccttcgatggctacttgtccgctctctcgccgcttcagctcgtacgcagcaacagtcggcggttcatgccgtcccaggctgatgacgaggcgcatcagttgtcgtatctgcaaaagcacttggctaaccttgtgtctcttctagcagagcc

SEQ ID NO: 9799 - DNA, 258 bp, Glycine max
  Clone ID: 701102903H1
cggctcgaggaaaaagttttgggatcatctgatcccgattcaggtaaaggcaagagcaagatgaagaagcacataactcatggctttcacttggtaaagggaagatcaggtcatgccatggaagactatcttgttgctcaatttaagcaagttgacaacaaagagttgggtttatttgcaatatttgatggccactctggtcacagtgtacctgattacttgaagtctcatttgtctgatgatatcctgaaagaccct

SEQ ID NO: 9800 - DNA, 281 bp, Glycine max
  Clone ID: 701102904H1
gcgtagtaactcggatcggctcccctcgagcgaatcggtcgacggctcgaggtgtaactagctgcacagttgtgatggcatacgtctctggaagaagttctgctctgaacccaaatgcacctatgttcatacctgctgcacttcgtcaggtggaggatttttcacctcaatggtgggatcttgtgacatcttcaacatggtttcgtgattattcgttgagccaccataaggaggaagaatttgcatcagttgccaatgactctactaatgatgatatggag

SEQ ID NO: 9801 - DNA, 257 bp, Glycine max
  Clone ID: 701102905H1
caaaaaacatacttcttgatagtaatttcataccaaaggtttctgattttggtttggcaaaattgctgagagatgaaacatctcacattagcactcgggttgcagggacattgggttatctagctccagaatatgcaaattctggccaggtttcgcgaaaatcagatgtttatagcttcggagtgttacttttacaaattgtgagtggcctagcagtggtggatgcctatcaagacatagaacgtttcatagtggag

SEQ ID NO: 9802 - DNA, 258 bp, Glycine max
  Clone ID: 701102906H1
cagacccaaagaacacggagttagcggcagaactttatctctctgatttcgatcatggcagctgtagctccttcttctgacaaaactgcagatttattgcagaatttgactctggactctgagtccaaagccattggagttgctgagcctgcgaagtagaatggacctgcgtttaccaatggggacgctaaagggagggccaagccattcaatccaaattcatgctttgttccacatgggtacacatctgcgtattat

SEQ ID NO: 9803 - DNA, 257 bp, Glycine max
  Clone ID: 701102907H1
ttcccattgtaggctgtgagctcacgccttacgtgctcctacgccgacctgataagaccgttaccaccgatgatttcccggaaaccgccccgttagacggccatttcttgcgctacaagtggtatcgtgtacagagtgataaaaaggttgctgtttgtagtgtacatccttctgagcaggccgcactgcagtgcctaggttgtgtaaaggctaaaatacctgttgccaaaagttatcactgctctccaaagtgtttt

SEQ ID NO: 9804 - DNA, 256 bp, Glycine max
  Clone ID: 701102908H1
gtagagctgaggcacaccagctctattccagaaaagccatatttgatgcacttggggttcaactttttgcagttcttcatgagcaaatagactcagaggtaaaagatttctggcctcgatactggggcggtgtcgtgcttcttgatcgaggtagggacttcttcaaagctcttggagggggaaaactgctcaaggagaagttcctatcaggatttttgctgaatcctcgatcactctccaactacaagcgtgcaaa

SEQ ID NO: 9805 - DNA, 251 bp, Glycine max
  Clone ID: 701102909H1
gaaaatcacacaaaagcacacacacacacacccttcttcgagtctgaatttgtatcattgacaattttttcacaaagggttgttgtctcttcagagagacacagatcttgaggttggaggcaaaatccttcacacactttggtggttatggaaacagaagagaggaaccagaaagattgcaaggcttcggagccagagtttttcttgcagtgggggaacaggaagaggctgagatgtgtgagggtgaagga

SEQ ID NO: 9806 - DNA, 255 bp, Glycine max
  Clone ID: 701102910H1
ggaaagcatcctggagaactcttgactatgctgtcttcaaacaagtatttgtcatcaatggaggaacctcagatgctactgaaggatgtgcttgaccaacggcttcgactaccaacggaccaattagcagaagcagtagtgttcacaatgaccatagctttggcatgcacacgtgcggctccagagtccagacccatgatgcgtgctgtggcacaagaactatcggctactacacaggcttgtcttgcagagcca

SEQ ID NO: 9807 - DNA, 255 bp, Glycine max
  Clone ID: 701102912H1
cttcttctcttgcggctagggttttagcgcagttgcttctagataccaggcagatgggtaaggaaaaggttcacatcagtattgtggtcattggccatgtcgactctgggaaatccactaccactggtcacctgatttacaagcttggaggcattgacaagcgtgtgattgagaggtttgacaaggaagctgctgagatgaacaagaggtctttcaagtatgcctgggtgctggacaaacttaaggctgagcgtg

SEQ ID NO: 9808 - DNA, 253 bp, Glycine max
  Clone ID: 701102913H1
gatctatccactcacctgcctcttcctcacccctttctccatctaacgagtaaggaaaaatggcgcgtaagaagatcagagagtatgactcaaagaggttgttgaaggagcactttaagagactttctggcaaggagttgccgatcaagtctgcacaaattactgcatcaactgatttcactgagctacaagagaaggaaccctggctttcatctgctaaattggttgtgaaacctgacatgttatttggaaa

SEQ ID NO: 9809 - DNA, 256 bp, Glycine max
  Clone ID: 701102914H1
caaggaggagacaacacaaagtgcaaaaaaacagaaattaaacactactagtagctagctagggtgagaaaatgggtgaagctaaggaaatatggtctgcaccaataacccctagaacagcttcagtagtaggaacacctgttgtgcgcatctccacctgtgtcatgtccaccctctcagcttcactcaccatctctaacaaggtcacctctacttcaccctgaggatggagatgcaccacgtcgtaaaacatcta

SEQ ID NO: 9810 - DNA, 257 bp, Glycine max
  Clone ID: 701102915H1
atcaggaacgccacaccatcagtttccttctgctagcacacagacggttatagaggaatctgagtatgagtttgagaatgatcggcaaagatatgctggactagaggcaacaaagccaggtgaaaagcctagggtggttgttcttggtacgggttgggctacgtgtcggttcctcaaagggatagacaccaaaatttatgatgttgtgtgcatatcaccaatgaatcacatggtctttactcctttgcttgcttcaa

SEQ ID NO: 9811 - DNA, 254 bp, Glycine max
  Clone ID: 701102916H1
gagcatttgaggccttgaacactcatcttgcctccaatacttaccttgttggccattctgttacccttgctgacatcataacaacatgcaacttgtatttaggattcagccagctcttagttaagagcttcacctctgagttccctcacgttgaacgatacttttggaccttggtcaaccagcctaacttcagaaagattctaggtcaggttaagcaaactgaggctgttccacctattccatcggcaaagaag

SEQ ID NO: 9812 - DNA, 267 bp, Glycine max
  Clone ID: 701102917H1
gtttgaactttgaacgttgaaggaacatagaggcagaggtttttcttctctcaccgtagaatcgaatcgagttcactttgatcgtgtgtgtctccgatcttcaaatccgcaacaaccatggtgaggggattgctcaacaagctcgtctctcgctccctctccgtcgccggaaaatggcagcacaaccaactccgccgcctcaacatccacgagtaccagggcgctgaattgatgagcaaacacggagttaatgttccgagaggcgtg

SEQ ID NO: 9813 - DNA, 260 bp, Glycine max; identical to SEQ ID NO: 7742
  Clone ID: 701102919H1

SEQ ID NO: 9814 - DNA, 261 bp, Glycine max
  Clone ID: 701102920H1
ttgcaacaagttcgacatccatttgtgcagtatgataatgcttttaatcagttgagtcagatgtcacaaaatcaagcttcacttggctatggacctcaaccaagccctatgatgaatccttttggtgtcacagggttgaatcaggtgcctagggatgctgcttatgtacagtggccaagtgctgcagtaatgtatgcacattcatatgaccaatttagacaagctgttttccaggctccatttggtcaacgcccattgagt

SEQ ID NO: 9815 - DNA, 260 bp, Glycine max
  Clone ID: 701102921H1
ctgtgtatttccctacctctcccttcaagatgcagatcttcgtcaagaccctcaccggcaagaccatcacccttgaggtggaaagctctgacaccatcgacaacgtcaaggccaagatccaggacaaggaaggaatccccccggaccagcaacgtctcattttcgccggaaagcaacttgaggacggccgtacccttgctgactacaacattcagaaggagagtactcttcacctcgtcctccgtctccgtggtggcatg

SEQ ID NO: 9816 - DNA, 252 bp, Glycine max
  Clone ID: 701102922H1
ccaacttccaaaccctaaaagtctacgcttttaattttctgttgtcttctctctcaaatcggtgctcccttcggcggcgcgtgagggtttccagcggcgcgtgacggtcgttattcgcgcgtcattccaagttccccgctgacctatgctttcgtcgacccacattggatagttcacgccggagagaaggcggaatctcactggacggccgtcatttggcacctccatggcttccgccgtccttgctaatcg

SEQ ID NO: 9817 - DNA, 257 bp, Glycine max
  Clone ID: 701102923H1
cggctcgagctcgagcgattcggctcgagtagtcattcctgtttcatatacttcattacattactcacacagtaatcacttgctgcattttctttcctcactcttcacccttgagaatttgtcattccgacatggaacttagttttaagcaccattttggccttgcttgtgtcttactacttttagctgctctgtgtagctcacaggactctttcactgactcgagcccaacatatcatggtagccctgattgctat

SEQ ID NO: 9818 - DNA, 255 bp, Glycine max
  Clone ID: 701102924H1
gcattggcaaggcctgcgtcttacacgaccaagtattttggttgtgaacttggggcccagtcaaaatttgatgagaagaccggcacttctcacgtcaatggagcacatgatactgttaagcttgctggccttcttgagaacttcattaagaaatatgttcagtgttatggttgtggaaatcctgaaactgagatcataatcactaagaaccaaatgatccagctgaaatgcgctgcttgtggttttgtgtctgat

SEQ ID NO: 9819 - DNA, 255 bp, Glycine max
  Clone ID: 701102925H1
cttcaatttgctttgtgctcactcatctatctattataaccaaacactcttcttcatattcttcttcttcttcttgttcttgttctatctgtgacgagcatcatggcctcgagagcagtgctattgttggctatgtgtgtgcttccggccatggttgtggccattcgcccagcaaagaaccctttttgcgtgaagggtcgcgtctactgtgacccttgccgtgctggttttgagacctcagcaaccacctacatt

SEQ ID NO: 9820 - DNA, 235 bp, Glycine max
  Clone ID: 701102926H1
cacaatctaaaactcccgttttctctctctgtttttccatgggcatctgatcaaacttttcttaattctctctctcagtgtttgctattctgagtgatgggtatgcccttccgctgttcccacacctcgcatatcagtgacatcatcatcaccagcttcttgcggcacaagtctgaaattacaacaatttccctcaattattgatccagcggccatcttaatagccttgtccaat

SEQ ID NO: 9821 - DNA, 252 bp, Glycine max
  Clone ID: 701102927H1
agccacgtctgcatcacgatttgactcaagtctcaattgaagccaattgcttattttcgacgtggatcatctcggatggacttggatctcttctgtcacttcacgacaccgactttcctcacgacactcgtcaccctcgcgcgcatctcctcgcgctacttcatttcatacttttaatcggcacagatttctatcgcgcatttctgggtcagcatcattagcgcgcgtcaatttctttcatctgttcttgcg

SEQ ID NO: 9822 - DNA, 237 bp, Glycine max
  Clone ID: 701102928H1
cggctcgagtgtagtgagggactcatggattgcgcggccacagatagcttcagtgggttcgtgttgtcttctgggagcgatttcaaagggagttctttatgtggctaatctcggggattcgagggcggttttgggtaggaaagcgttggaaggagaggtgaattgtggtgctgtggtggcctagcgtttgtccactgatcataatgttggggtggacgaggttaaaaaggaggttga

SEQ ID NO: 9823 - DNA, 257 bp, Glycine max
  Clone ID: 701102929H1
cacaaacaaaaactcccgttttctctctctgtttttccatggccatctgatcaaacttttcttgattctctctctcagtttttgctattctgagtgatgggtatgccctgccgctgttcccacacctcccacatcactgaaatcatcatcaccagcttcttccgccacaagtcttaaattacaacaatttccctcaattattcatcaaccaaccaccttaatagccttttcaaatggttcctgaaagatccaacttg

SEQ ID NO: 9824 - DNA, 257 bp, Glycine max
  Clone ID: 701102930H1
catttacacaaaatcatcaatggcaatggcctctcttgcatcctcaagtgttcttttgaacctcttgttcatcgtttctgcgctccatttgggagcagcagcagcaagaattctgagtgaaaaggaggaccaacaacagttgcagttccaataccacaaaggccctcttctcagcggcaatatctctgtcaatctcatatggtacggtagcttcaagccttcccagcgagccatcatctccgatttcatcacctccc

SEQ ID NO: 9825 - DNA, 258 bp, Glycine max
  Clone ID: 701102931H1
agatgacaagataattgctgtctgtgctgatgatcctgagtataggcattacaatgatatcaaggagcttcctccacaccgtttagctgaaattcgtcgtttctttgaagattacaagaagaatgagaacaaggaagttgcagtgaacgactttcttcctgcctcagctgcctatgaagcgatcaagcattccatgaccttatatgcggaatacgttgtggagaacttgaggcggtagtgttgattcctgggtgcttg

SEQ ID NO: 9826 - DNA, 265 bp, Glycine max
  Clone ID: 701102933H1
aagcaatccagggttgcgggcagaacttattcattcagttaaagagaaacttaatctaatttgtggatgcgctttcatgacatatccttctgcatttgcttctgtatctattggcagatcaaagtggaatggaaatgttgggaactcgggtctggttctaagagttgatgttcctctctccaccgttgggcgcccttccttctccattcagataaatagtggcattgagttttgatagcattctagtgtttggtatcatcagttt

SEQ ID NO: 9827 - DNA, 251 bp, Glycine max
  Clone ID: 701102935H1
ttccgttggtgccattcgtgcagcaccggatcctctcatttctccggcgataactctcccttttccggcgaattcaccgcttcctcgatatgaatcccgagtatgactatctgttcaagctccttctgattggagactctggtgttggtaaatcatgccttcttctaagatttgctgatgattcatacattgagagctacataagcaccatcggagttgattttaaaattcgcactgttgagccggatggg

SEQ ID NO: 9828 - DNA, 199 bp, Glycine max
  Clone ID: 701102936H1
aaaaacaccaattctccaccctctcattgaaaaaaaaaacaaccaaacaaaaaaaatcaatcattttattttatttttctacgaaaatggttgatttacattggaaatcaaagatgcctagttccaaaacaccaaaactctctctctccgacaacaagtccttaccctctttgcaactacccttccgcaccacagatat

SEQ ID NO: 9829 - DNA, 255 bp, Glycine max
  Clone ID: 701102937H1
cgaacccaaaccgaaaccctaaccctaacggagagatggcggacacttggcatcgatattcgggacggagaaggacatggtgaactgtccgttctacttcaagatcggcgcgtgcaggcacggcgaccggtgctcccggcttcacaccaagccgacaattagcccaacattggttctgtcgaacatgtaccagaggcccgacatgaacatgagcattatcaccaaccccgatcagccacaaccccaatcccttga

SEQ ID NO: 9830 - DNA, 256 bp, Glycine max
  Clone ID: 701102938H1
gaagagttgaatcctttcaagaatcaccagaacatgttagctggcatagactatattgttgcacttcagagtgatgtatttctctatacttatgatggaaatatggcaaaggcagtacaaggccataggcacttcgaaaacttcaagaagactatcaatccagacaaggtaaattttgttaaactcgttgataagttggatgaaggaaaaatttcttggaagaagttcagctccaaggtaaaaaggctgcatgaag

SEQ ID NO: 9831 - DNA, 251 bp, Glycine max
  Clone ID: 701102939H1
cgtgggtggtggttccggctgctgcgtcgggtctgccaccgtctccctcttcctctgcaaggaagggagggtgtgtccgagccaattttggtaacaatcctgctgtgagaattgaggggttcgattgccttgacagggacaggcgaaattgcagcatcccggctctggcttagaacaccctcctcacacgccacacgtctctttgatattaggattcagttcaacatataaacataaccacagaagatgag

SEQ ID NO: 9832 - DNA, 255 bp, Glycine max
  Clone ID: 701102940H1
agccttcctagaacgaaaaaaaaaagaagagcaattttccctcaccaaagaagaagaagcaaacaatggccgatcaacttaccgatgaacagatctccgagttcaaggaagccttcagcttgttcgacaaggacggcgatggttgcatcacaaccaaggagcttggaactgttatgcgttcattggggcaaaacccaactgaggcagagctccaggacatgatcaatgaagtggatgctgatgggaatggtacca

SEQ ID NO: 9833 - DNA, 256 bp, Glycine max
  Clone ID: 701102941H1
gttcacttggcaaccatccctatcaccggcactggtatcaaccctgctcgtagtcttggtgctgctatcatcttcaacaaggaccttggttgggatgatcactggatcttctgggtgggacctttcattggtgctgcacttgcagcactctaccaccaggtcgtaatcagggccattcccttcaagtccaagtgattcaatcaaaccgttcatgcttaatcaagttgggaacaacaaaagaactcaaaacaatgtt

SEQ ID NO: 9834 - DNA, 257 bp, Glycine max
  Clone ID: 701102942H1
gcatatatataattaacaccctcgcatttttttcttcctaaaagaaaaaaaagaagaagatggagtttgtgaagagagtattgggaagcagcaagagattgtatcctgaaaacagtggtggaagtggcagctacggcacgaagattgagcacctcaaagaagaagaagaagaaggctccacagggttgcatttgcgtctacgttggagccgagagagagagattcgtgatcaaggtaaagatcgcaaaccacccttt

SEQ ID NO: 9835 - DNA, 248 bp, Glycine max
  Clone ID: 701102943H1
aagaaatggagagaaaggagtgaaaaaattatatgtgcaaaaatggcaagaaatagccaagaaatgcataacaattctacctataatcaattttgcatgatgccttaagcaattttgaacaactctgtgttaccagctaacactcacctgcatctagagttgacaaaatggacatgttagtcaggtccatcaggtcggcatttgtttccagcattctcactgttgaatctatcacctcccattgtaat

SEQ ID NO: 9836 - DNA, 232 bp, Glycine max
  Clone ID: 701102944H1
cttcagcacaatggcttctctggcattattccttctcctgtgacgcctaaactcatggcattggacatttcctttaacaacttttctggcagcattccacgagcttttcagaatcttagaagactcacttggttgtatctccaaaacaattctatatctggagctattcctgacttcaaccggccaagtctcaagcatttgaagttgagcaataatatcttgaatgggctca

SEQ ID NO: 9837 - DNA, 256 bp, Glycine max
  Clone ID: 701102946H1
tgacaagggtagactgtcaaaggaagatatcgagaagatggttcaagaggctgagaagtacaaatctgaggatgaagagcacaaaaagaaggttgaggccaagaatgctttggaaaactatgcatacaacatgaggaacactgtgaaggatgacaaaattggtgagaaacttgatcctactgacaagaagaagattgaggacgcaattgagcaagctatccagtggctagacagcaaccagctcgcagaagcagat

SEQ ID NO: 9838 - DNA, 257 bp, Glycine max
  Clone ID: 701102947H1
tttcgaatgggatgctaactttggaattccaggagcattttacatcagaaactacacctatgatgagttcttccttgtcagtgtcactcttgaggacattccaaatcatggaaccattcacttcgtctgtaactcatgggtttacaactttaaagactacgacaaaaaggatcgtattttctttgccaataagacatatcttccaagtgcaacaccgggcgcattagttaagtatagagcagcagagttgaagattt

SEQ ID NO: 9839 - DNA, 266 bp, Glycine max
  Clone ID: 701102949H1
attttgcaactgctcgcagcttaacgctgcaatttctttccaagttgatcgagcgacttcaggattgccttgcatacttttggtgtttgaagagctaatctgtctaccaaaatgaagggacgtgtaaggtgggatgaggctaatattggagaaattgaggcaaacaaacctgtgaggcagaaaattactgagcctaagactccatatcatcctatgattgatgatgacagttctctatctcctgtacgaggaagttttgatgcatg

SEQ ID NO: 9840 - DNA, 262 bp, Glycine max
  Clone ID: 701102950H1
tgaatatgcaatcgaagccatcaagctgggatcaactgcgattggattgaagacgaaagagggtgttgtccttgcagttgaaaagcgcatcacttcaccactgctggagccaagtagtgttgagaaaattatggaaattgatgagcacataggatgtgcaatgagtggattgattgctgatgctcgaacacttgttgagcatgcacgggttgaaactcagaatcataggttctcctatggtgaaccaatgactgttgagtcc

SEQ ID NO: 9841 - DNA, 245 bp, Glycine max
  Clone ID: 701102951H1
aatttctcgatgatagatgaattacaagaataacataggttgtcgcaacagggagattcacgaaaagcaacacgagtcatggtcggaagccgagaggacgggaagccggatcaggatagtgggcttcagtgggcctctgagcggaccactgagcgggcctttgagtgggcctttggtgtcttctaactaaagacccagcagcaagaatataagtgcgaggttcaaggacgacgaggagattgtgg

SEQ ID NO: 9842 - DNA, 259 bp, Glycine max
  Clone ID: 701102952H1
ctccctcgctcaataatacaaaacaaaaaagaagaagaagaaggtcttcgcgatggcatcgaaacggatcttgaaggaactcaaggatctccagaaggatcctcctacctcttgcagcgccggtcctgttgctgaagacatgtttcactggcaagcaacaattatgggtcctccagacagtccttatgctggaggtgttttcctagtcactattcatttccctccagattatcccttcaagccacccaaggttgcattc

SEQ ID NO: 9843 - DNA, 256 bp, Glycine max
  Clone ID: 701102953H1
cagagccaaggtaggttaaacactcttcttcatcgtcgtcgcaatgggacgtgtgatccgtgcgcacgtaagggagcaggctcggtcttcaagtcccacacgcaccaccgcaagggccctgcccgcttccggagcctggatttcggagagcgcaacggctacctgaagggtgtcgtcactgacgtcatccacgatcctggccgtggcgcgcctctcgctaaggtcgccttccgccacccgttccgctacaagaagc

SEQ ID NO: 9844 - DNA, 255 bp, Glycine max
  Clone ID: 701102954H1
ggcgacgccaccctcctcatccacgagggcgtcaaggccgaggagctctatgagaagaccggggaactccccgaccctaactccactgacaacgccgagctccagatcgtgcttaccatcatcagagatgggttgaagaccgatcccaccaggtaccgcaagatgaaggagcgtctcgttggggtttctgaggaaaccaccactggtgttaagaggctatatcagatgcaggcgaatgggactctactcttccct

SEQ ID NO: 9845 - DNA, 254 bp, Glycine max
  Clone ID: 701102957H1
cttcgttatcttttctcagactccgcggcgtagatccgaggagttcgggaaatcctaactcatcatctcaactcaagtcatggctggacttgcacctgagggatcacagttcgatgctcgtcaatatgattctaaaatgagtgacttactttcatctgatggacaggacttcttcacatcctatgacgaggtttatgatagttttgacgctatgggtttgcaggaaaatcttctcaggggaatttacgcatatg

SEQ ID NO: 9846 - DNA, 253 bp, Glycine max
  Clone ID: 701102958H1
atcttctgcctactgctaggtgaaatgcagaatccagatgcaaatcaacttcccgaagttgattcgttgccagatgggtttgttgagagtactacagagcctcttgctcctgcaactccatctcctgaacaagagaaacccctgaatagttacaaggatgatggcccctctgaccttattcattctaatgaacgatcaaatgatttgggagaaaaagagtttcaaaacaatcatgactgctcagcggagagtc

SEQ ID NO: 9847 - DNA, 255 bp, Glycine max
  Clone ID: 701102959H1
taatttgtccgaagatggaaaagatttcattgaaaaatgtttcattaaggatcctaagaagaggtggagcgcagaaatgctattgaaacacccttttctactcaacgatgacactgtttcatttaagcgcgtctcatgagtcgcccagaagccactttgatttccccgattgggtttctagcgtggcgaattcgcttcccagttcgccggaatttcaagaaaagtggggttttgatgatgagttctgttcgccgg

SEQ ID NO: 9848 - DNA, 242 bp, Glycine max
  Clone ID: 701102960H1
aaaagatgaaatcctctctgatcttgttatttatgatctgtggtggagtgattgcaactcctccagaggatccaattccgtgttcttcaaagaacacagactgcaccatcacagacacctatggcgtctttccggaccgaagcatttgccacgccggtgaggttatgtacccaaacatagaggaggagttcttatccgtggtggcctcagcttcgaagaagacaagaagagtcaccgccgcc

SEQ ID NO: 9849 - DNA, 267 bp, Glycine max
  Clone ID: 701102961H1
tgacttgagagttggcaatcgctccattattattccctacacaggcaatgagattatgttattgtgtgcaaaggaaggcaaactatggtgtacgtttctctattcccccaccctaagatctgttgtatgaagggggcctacaaaatgaatacttcaaattcaaagatgtatgtcagatattaggtgttagagtaggcatggctattcattgattcaagccatacgttttacacattaaatttgttggatacatgctttatgtgatga

SEQ ID NO: 9850 - DNA, 257 bp, Glycine max
  Clone ID: 701102962H1
ctcctctgtaacttcaaaacatacacctcttctctctgtttctcttcactctctctctccctccctcttcaactaacatggcaattgaaaaccaagacaccgctgtcagagaaatcaagcccaagaacaggagaatcatgggtgctggagggcctgatgatgaggacaataggtggccaccgtggttgaagccactgctgaaagagagcttctttgttcaatgcaagtcgcatgctgattctcacaagagcgaatgc

SEQ ID NO: 9851 - DNA, 253 bp, Glycine max
  Clone ID: 701102963H1
atttggcttggaacgtatccagtgcctgagatggccgcacgtgcgcacgacgtcgccgcgctcgcgcttcggggcacgtcggcttgcctcaacttcgccgactcggcgtggcggctgcccttgccggcgtcgacaaatgcgaaggagatacggcgagtggcggcggcggctgctgtagcgattgcggcggaagacagctgcggcgagcagttacagaatagtattgtgaatgatgccgttgctgatgattgtg

SEQ ID NO: 9852 - DNA, 259 bp, Glycine max
  Clone ID: 701102964H1
gaagaaccaacaagaggggtattgagattgagattcaagtaatggggaagagcaaggttcttgtggtggggggaactgggtacatagggaggaggatagtgagggcaagcctggcactgggccatgagacctatgtggttcagaggccagagttgagcctccagatagagaagctgcagaggctcctctccttcaagaagcaaggtgctcatctcattgaggcctctttcaatgatcacaagagccttgttgatgctgt

SEQ ID NO: 9853 - DNA, 264 bp, Glycine max
  Clone ID: 701102965H1
aaccgtcatcataaattcatatatcatcagcctcagccatgtcttcttcgctcttgcacctcctcttccttccacaactacgatcttcgatagtgctttctcagattcttccttcgtggtaaccggtcgaatcatggagcccatggacattgttggcaagtcaaaggcagacgcttcgcttcctaaagctacaatgacaaatattattaaagagatgttacccccagatgtacgttttgcaagagatgcccaagatctattgat

SEQ ID NO: 9854 - DNA, 260 bp, Glycine max
  Clone ID: 701102966H1
gttgttggaaattctatgccagtgtgctgagggaagagcagaacttttgaatcatgcagcaggtcttgccattgtgtccaaaaagattctaagggtttcgactttggccaatgatagagctgttaagattcttctgtctgtttcgagattctctgcgactccacatgttgttcaagaaatgcttaaacttggtgtggtcgcgaaattgtgcttggtgcttcaggtggatagtggaaacaaggctaaggaaaaggcaagag

SEQ ID NO: 9855 - DNA, 258 bp, Glycine max
  Clone ID: 701102967H1
caaacattttccatggctcttctaatccactccccggaaatgtccgttgccccccaaatttctcaaaaccctaaccctaagctgagcaaactccacagcttcaaaccctaccccaagggcaaagcgattgggtcaacgcgcggtgtgagaatttcctgcaaggtgaaagattgtgtggttttggatgagaacgtgaattcgtacggtcaattttcggttccggtgaagcaagggtcgaagcagagcaaagaggaggag

SEQ ID NO: 9856 - DNA, 257 bp, Glycine max
  Clone ID: 701102968H1
cccaaatcgtagatctacggttaaattggtgtagtgtggtaagatgggaggaggatttagagtgcttcacttagttaggccatttctctcgtttcttcctgaagttcaaactgctgacaggaaagtgccatttagagagaaggtcatatacactgtgatctctcttttcattttcctggtttgtagtcagctccctctatatgggatacactcaacaacatgtgctgatccattctattggatgcgtgtcattctcg

SEQ ID NO: 9857 - DNA, 256 bp, Glycine max
  Clone ID: 701102969H1
aacctatgagaattcattatgcaaaaacaaagtcagactgtattgcaaaagaagagggtagttttgttccaagggaaaagaagaagaaacaagaggagaaagctgaaagaaagcggcgtgttgaggaagcacagcaatctggtgtggctaatggaacacatagtgcaagtaatggtggtccaactgcatcattccgtcaaggacccggtgctcaagaagcagctgctcctaacaatattttgttcatagagaatct

SEQ ID NO: 9858 - DNA, 252 bp, Glycine max
  Clone ID: 701102970H1
ctcttcttctacattagtccttgttattcattattcattctcagcctcttttcttctggggggcaaaaggggtcacttttcagatccgagattgagctcctttacccatcatcatcatggagctcctcgggtacctgaatcagggtcacccttctagaggaacaagacttgttattactctttcattggtgctttcgacacttgtgtccttctccactttcacacatgccttctctccttctgcgtttccgg

SEQ ID NO: 9859 - DNA, 249 bp, Glycine max
  Clone ID: 701102971H1
cctctcctcgccgtcatcgccgcagcattggccaccatcagtttctccggctacgtgttgcagaatggagtcaaatcaggcagcttcttctatggaagttgagactgtcccatctgaagccaaacttttgccaccaaagccaaagtttgagcctttgaagcctcatgagatgtctgatggtcaggtacagttccgcaaggtgaatgttccacctcatcgttacagccctctcaagaaagcttggatgga

SEQ ID NO: 9860 - DNA, 250 bp, Glycine max
  Clone ID: 701102972H1
gaggcctgtgcggtgctctgagaggaggggccatagtttgggaccctttgaaccctaatctccacccaaacccattttcccgggaagttccctctgaaacgaagacgaaaatgcagaatcacaggctgaagcagcagcaacaagctctgatgcagcaagctcttctccaacaacagtctctctaccaccctggtctccttgctcctcctcagattgaaccaattccaagtggaaatctgcctcctggttt

SEQ ID NO: 9861 - DNA, 251 bp, Glycine max
  Clone ID: 701102973H1
attccatgtgaggagagccagtgttctgatagcttgaccactactgatactgaaaatcttagttctgaagcaggtgttcagattgtggagagcttctcagcatgcagtgttgaatctgtccaacctcctaaggctgattctccacccagcagtgtgtcaacaaatggggtttcatctccttcagtggctgcaagctcagactcatctgatgttgctgcttccaagtctcccagtcaggaacaagtttcagc

SEQ ID NO: 9862 - DNA, 252 bp, Glycine max
  Clone ID: 701102974H1
ccggaacgcagaggtcatcagaaaaatggccatcggagagattccggctaccaatatcagggacggtattggggtcggagccagagaaggaggaggagttgcagctgtggacggtggtggtgacgaatttgctcacccagaatgtgtccatgtccaagacacaagtagttcaccctccacccaaccccttttacttgtaatttgtggaaaggaaaagggattgactgaactctaccgagaggattcgtaaca

SEQ ID NO: 9863 - DNA, 252 bp, Glycine max
  Clone ID: 701102975H1
ctcagcagaataatggatcctagacttgaaggccaatattctgaaatggggacaaaaaaagcagcagcattggcttaccaatgcctcagccacagaccaaggagcagaccctcaatgagcacagtggtccagacccttgagccactccaagattttgatgacattccaattggaacatttgtttacacagctccaccggataatactgaaatgcatagtgcaaaggctcaatgtgagacacctaagaggagg

SEQ ID NO: 9864 - DNA, 250 bp, Glycine max
  Clone ID: 701102976H1
actacaccaaagtactccaaggccaggtatgatgaaattgtgaaggaagtttcttcctatttgaagaaagtaggatacaaccctgacaagattccttttgttcctatatctggttttgagggagacaacatgattgagaggtccacaaaccttgactggtacaagggtcctactctgctagatgcacttgaccagatctctgagcccaagaggccttctgacaagcccctcaggctaccccttcaggatg

SEQ ID NO: 9865 - DNA, 250 bp, Glycine max
  Clone ID: 701102977H1
gctgcctcatattagagaaaggaaggttgtgtatgtggaagatattgctgaaggtcttgagaatggtcctgcagccttggttggcctctatagtggtcgcaatgttggtaaacaagtggttgttgttgctcgtgactgaatgcagatgctttcgttggacattgctgtcttgttttatgattttggtgttgaatattcagggcgctttgtatgtttttggcaatcatttgcaattgtggtattggtgata

SEQ ID NO: 9866 - DNA, 253 bp, Glycine max
  Clone ID: 701102978H1
gcgcacagcacccaaccgtgaagagagactccatggccgagtgcaccgtccccaagtgggcccaaaaaaccgtcagcttgccccctctccggcgcggctgtcatcttgtcacttccaagatagtgaaggaaattgagcaagacctctccggcttcaagtgtggcctagctcatctcttcttgcagcacaccagtgcttctcttaccatcaatgagaattatgactcagatgttcgcgaggataccgaaacctt

SEQ ID NO: 9867 - DNA, 137 bp, Glycine max
  Clone ID: 701102979H1
atcctatctctttgcatattctttcttatcatcatcttcttctctcttgcctccagaattgaaaagttcttcctctgcccatagtctttgacacccttttccaatctctagtttttttattgggcttccgctctata

SEQ ID NO: 9868 - DNA, 258 bp, Glycine max
  Clone ID: 701102980H1
cgggcagtagccgagattccgtgagttgcaaaaatgaagacgattctttccaccgagaccatgaacatcccggacggcgtgagcatcaaagttcatgccaaggtcatcgaagttgagggcccccgcggaaaattggtgcgagacttcaagcatttgaatctcgattttcagctcattactgacgaaaacggtaaaagaaagctgaaaatcgacgcgtggtttggttctcggaaaacatccgccgccattcgcaccgcc

SEQ ID NO: 9869 - DNA, 262 bp, Glycine max
  Clone ID: 701102981H1
gccggccacttggcttggtccctaagggaacaaggcatgtgatggagaaagaagtagtcactccaatccaaaatggcccctttgttcactcccaacctgcttccatacccttcataagtgaggggtgtattggcatacacctctttcacctcaagtggctgctgaaagaactccctccacacctccctcgcccccttcatcaactcatggctcaccccatggttcaccacctgaaaaaaaccccattcccggcatgcctccg

SEQ ID NO: 9870 - DNA, 258 bp, Glycine max
  Clone ID: 701102982H1
gcaaaggggattcaaggtatgcaggaagggatgcaggggtagttactgttgaaggaataacagcggttttggagggtccagctagccttctagcagtatacgctatagctactgggaagtcatatagctacatacttcagtttgccatttctttgggccagctatacggaactgctgtttattatataacagcaatcttggaaggtgataatttttctacaaactcgttttactattatgcatactacattggagcaa

SEQ ID NO: 9871 - DNA, 258 bp, Glycine max
  Clone ID: 701102983H1
cggcgggaacgccgttttgaccctgacctccggtccagccaccgtaaccctgaacgaaacaggggaacaatactacatttgctcctttggatcacactgttccggcggtcagaagctggcaattaacgttaacagagcttcttctagcactccttcccctgctcctgaagcacaagcaccagcaccaaaagccactagccccatttctccaccaaggtctacaccagcacctggcccttcctctggatcagttactta

SEQ ID NO: 9872 - DNA, 257 bp, Glycine max
  Clone ID: 701102984H1
actttattgagtctttaacaagagttatgcaaaaggggttctttgaatcacgcgcttatgcagtgttcttgttaaaatccatgtccgaagtggctgagccagtgcaattattgcatctaagacaagacctttttgtcgaactagtacaagtcttcaaggatcaaatttctcaaaagacatcaaaagcaacacttcaaaccctgatccaattctctccttgggggaggaacaggatcaaagctgtggaagcaggtacc

SEQ ID NO: 9873 - DNA, 254 bp, Glycine max
  Clone ID: 701102985H1
cgtgttccatgccactatcaagacaacaatcgaccaagcgtatctggagttttatataagacacaaggatggcaccccaattagttcagaaccagagcgacaccgtgtgattcaatgcttgcaagctgcagtggagagaagggcatttgagggtgttaggctagagttatgcaccgaagacagacaaggacttcttgcagaagtgatgagaactttccgagaaaatgggctgaatgtgacaagggcagagatat

SEQ ID NO: 9874 - DNA, 252 bp, Glycine max
  Clone ID: 701102987H1
cctagacagggctattgaagcagaagatagaaagcatggagatttcctaagattggatcatgttgagggatatcttgaattgtcagcaaagacaaagacatactttgccactgctgttaacttatgggatgctgacttctatattaaagtcgacgacgatgttcatgtaaatatagcgacactgggacaaactctagtgagacaccgatcaaaaccgcgtgcctacattgcatgcatgaaatctgggcctgt

SEQ ID NO: 9875 - DNA, 250 bp, Glycine max
  Clone ID: 701102988H1
tgattctgtttttaacattctagtaagcttcatttgtcttgtagtaaattattcttacgcctgctgcatttttttataggccttgcgtctgctgcattgtgtcatcattactcaaacctccttatagactgtttacttggaacttctttaagatattggtttaagcatgtgaatgatttctatatgcagactagttgccaatgaacaaagatagtgggttaaaagactttacactacaatttaagtagca

SEQ ID NO: 9876 - DNA, 252 bp, Glycine max
  Clone ID: 701102989H1
tcgtggcttccagggtcataaagaatggcttgctgaggttcaatttctcggcattgttaatcacccaaatttggttaaacttttgggatactgctctgtggatggagaaagaggaatccaacggctgttagtgtatgagttcatgcccaacaggagcttggaggatcaccttttcaacaaaaaattgccaaccctgccttggaaaacacgattggagatcatgcttggtgctgcacaaggattagcttatct

SEQ ID NO: 9877 - DNA, 251 bp, Glycine max
  unsure at all n locations
  Clone ID: 701102990H1
cactcgagccgaatcggctcgagcggctcgagggactttaggttgggacctgggaattagggtacttcgcgtggcgaagatgaatgaggtggacttgaacgatcgattggggaagaaggtgcgcgtgaagtgcaacancgatgataccatcggcgacctgaagaagcttgtcgcggctcagactggcacaagagccgacaagatccgcatccagaagtggtacaccatctacacggatcacatcactctca

SEQ ID NO: 9878 - DNA, 251 bp, Glycine max
  Clone ID: 701102991H1
cttctcataagctctacttagcaaatcaaaatggcactttcttcttacatcttcaacatccatatttgctttagctttgttcactactcttttgcttataggaagttcttcagctcaactctctgagaacttctatgatagtaaatgtcccaaggttttctatgccgtaaaatccgttcttcaatctgctttggctaaagaacctcgccagggagcatctatcgttcgcctcttctttcatgactgctttg

SEQ ID NO: 9879 - DNA, 250 bp, Glycine max
  Clone ID: 701102992H1
ggctgggtcttgctctgaatttctctgtgttttactatgagattcttaactctcctgatcgtgcatgcagccttgcaaaacaggcttttgatgaggctattgctgaattggatacgttgggagaggaatcatacaaggatagcactttgatcatgcaacttcttcgtgataaccttaccctctggacctctgacatgcaggatgatggtgcagatgaaattaaagaagccgcacccaaaggtgacgggga

SEQ ID NO: 9880 - DNA, 252 bp, Glycine max
  Clone ID: 701102993H1
gaagaaacttaatcgatcatcacttcacttcactaatacatcatggcagacgagacccagaacaagtatgagagctctgaggttgaggtccaggatcgtggtgtttttgactttctcggtaagaaaaaggatgaagaagacaagcctcatcctcaggaggaggtcatcgccaccgagtttcaaaaagtcactgtctcagaccaaggagagaacaagcacagcctcttagaaaagcttcaccgatctgacagc

SEQ ID NO: 9881 - DNA, 252 bp, Glycine max
  Clone ID: 701102994H1
ggctttgttaattttctgacttaccctcttcacatttgtgtgcaatgttagaggacattgaatcatctactactcggctttgtaaaatgggattcggtcgaaattcgacctcaagaagcggagattacttggaaggaatgcttaacgactatgttggaggaaggataaaactgaaggctcagaagagcgtcgccacaacaacgaagtttgtggcagtgctcacgtgccttcagtttttctatgcagtctatg

SEQ ID NO: 9882 - DNA, 256 bp, Glycine max
  Clone ID: 701102995H1
cctcgagccgaatcggctcgaggtgattcagcatcctgggaacaagaccgagagggtttattgactcgctaagcgcacacgaggactatgaactcgaatcctggtcactatgttgcgcttgtcgtgtcctcgcccacgcttatggccgagaatggcacgccgatgaagcagcttaagcttctccgaccagacgatactttgcatattggccaggtttatcgcttgatcacgttcgaagctgtgttgaaggagtctg

SEQ ID NO: 9883 - DNA, 258 bp, Glycine max
  Clone ID: 701102996H1
ccgcatagatcataacaagagagggcttcctctctttaatgtggttccttcttcctgcctgccaatccttttccttatgttttagtcgttttagtcagtaaggccgagtttcataatatggtgtcaactgcatagttaaccttattcatgcaacacacctggacttaaattacagaggtacttacatttacctcattccaacgagatgagtaagggttcaaatccacgacatgttacacgcgagatcctatcttgttt

SEQ ID NO: 9884 - DNA, 272 bp, Glycine max
  Clone ID: 701103001H1
ctcgagccgttcgtttggcatgacttgtcggagaacgatttcatctacccgacgacgcaaacgcaagactacattctcaaaggatcggaaattgtggagcacaatgttaccggcgccggcgcgagggttaacaaatcggaggaagaatccgattcgccggtggtgatcacgaggcggcggaaccagtcgtggagctcaatcgatatgaacgagtaccgagtttacaagtccgaatcgttcggtgactcggctgggagaatcggcgccgacgc

SEQ ID NO: 9885 - DNA, 244 bp, Glycine max
  Clone ID: 701103002H1
cctcgagccgagccgaatcggctcgagcaaacacacaagccaaacacaaacacaacaacacacagaacaacagagcacaaacagactaattccaacggttgaattttttggctgaagacaccccaccgacgttagtcaaataaaacatgtcttgctccgtcgcggttaccaattacgccggtgttctctcctacttcttccctctactgctcgtagccctccatcatctccacttcgccggaat

SEQ ID NO: 9886 - DNA, 263 bp, Glycine max
  Clone ID: 701103003H1
agactctagttatatcacaaatgggtatttggagactaccatcgattggataccaggaattaaggaaattcggttgaaggatcttcccagcttcattagaaccacaaatccagatgagttcatgcttgatttcatacagtgggagtgtgggaggactcgaagagcttctgcactaatcttgaacacctttgatgccttagagcacgacgttttggaagcgatctcgtccattttgcctccggtttattccattggccctttga

SEQ ID NO: 9887 - DNA, 262 bp, Glycine max
  Clone ID: 701103006H1
caacatttctatgttcctgttgcacaccatgctgctgccgttcattttgttgtgaaggacagtgatgtggtgggttcacagctcattggcgttgtggcaattcctgtggaaaaaatatactcagggcaaaacgtacaagggacctaccctatcctgaacagcaatggtaagccttgtaagccaggtgctgttttgatggtatccattcagtacattccaatgcatacacttatcatgtattaccaaggagttggagctggtc

SEQ ID NO: 9888 - DNA, 265 bp, Glycine max
  Clone ID: 701103007H1
gtgaacacaaagctggagagtaccatggtgagcacaagccagagcacaaagaggggttcctagacaaagtcaaggacaagatccatggtgagggcggcgccgccgagggcgagaagaagaagaaggagaagaagaagaaggagcatggccatgagcatggccatgacagcagccgcagcagtgacagtgcttaaactgctgcatcacctatatatttaacaggtttatgggcccatagtagcgagggctgtgccttaatttctct

SEQ ID NO: 9889 - DNA, 266 bp, Glycine max
  Clone ID: 701103008H1
tgttggtaaagaaagaaagagaagagaagaatcgaagacgaagatggaggacgcatcagcatcaaagttcattccacaccaaatcggaggggtccaaaacgacgcgcttcgattcggtctccatggagtcaagagcgacatcgttggttctcaccctcttcaatcttcactccaatctacaaggagaatggatgaagcgatgaagaggcaatgcaaagttaacctgtacggaactgcttttcccatgaaggaggagcttgacaggc

SEQ ID NO: 9890 - DNA, 266 bp, Glycine max
  Clone ID: 701103009H1
gtccttctgagcgccaattactagtgagtgagatgcttgggaccaccgatgaaaatgagcctcttcaggcgatgatgaaagatcaatttgcaaattacgttgtacaaaaggtgctggaaacttgtgatgatcaacaacgtgagctgattctttcccgaattaaggttcatttgaatgcattgaaaaagtacacctatggaaaacacatcgtcacgcgtgtagaaaaacgtgttgctgctggagacaggagaatagctgctcaggct

SEQ ID NO: 9891 - DNA, 238 bp, Glycine max
  Clone ID: 701103010H1
gcttccttaagctccttagtgctgctccttgcagctctaattctatcccctcaagttcttgcaaactatgagaatcccccagtgtacaagcctcccactgagaaaccaccagttacataagcccccagttgagaagcctcctgtttacaaacctccagttgagaaccctccaatttataagccaccagtagagaagccaccagtgtacaagcccccagttgagaaacctccagtgtac

SEQ ID NO: 9892 - DNA, 267 bp, Glycine max
  Clone ID: 701103011H1
acagctcgagcggctcgagcaacatgcacagttacctgaagaagcaagagagcttgacaaggaggctagacagattgtaaaacgagacagaagaatctgttcgcaatcaagactttgagaaggccggagagctaagagatagagaaatggatcttaaggcgcagatatctgcacttatagaaaaaggcaaggagatgagtaacgcagaaagtgaggcaggagatgaaggtcccatggtcactgaagttgacatacaacatattgtct

SEQ ID NO: 9893 - DNA, 266 bp, Glycine max
  Clone ID: 701103012H1
caaaatacatgaaaatggaagcaactgagatcatattccttttgtcttttggtcaaaagagaagatatatggaatagcattagcttcttcaaatgaagaaaacaccagcccccagtttgcataaatctaaccaaagaaaaaagaatgttggattccaagatagaggtgcagccaatggtacacagagtcaccatgttgagagccattctgctctgacatatttcaagtcttccttcaagaaattttttacattgtttctctctggg

SEQ ID NO: 9894 - DNA, 266 bp, Glycine max
  Clone ID: 701103013H1
atttggtgcatgaggttgtctaacttttttttccaaatgtcctaatggaattcgtatatttaaaactggctattcattaccactttaattttattttattttttgcatcattgctgacatttgaagttaattccagcttctaacatttgtaaaattttccacactttcagttggcaattgcatggaagaagatagtttggagtctcggcatgtgggattctgtccgtgagtttgctagaatgtatgacgctggaatgggtatgatc

SEQ ID NO: 9895 - DNA, 268 bp, Glycine max
  Clone ID: 701103014H1
taggtgaagtgaagaagtgaatacttttcatattgcacttgtgtagttaagcttgatcacactacttaggcttagttgtattcctctctcttttatctgttaattgggtttttaagattcttcagatttcttcactttttctgtggtatttatattaaattaaaggagcgaatgagcgttttgtgtcttcttctgaattatgaagtcagaaaccgtttctgggtgtttgtgattccgaggaaactgtatctggttagcagtattagta

SEQ ID NO: 9896 - DNA, 270 bp, Glycine max
  Clone ID: 701103015H1
ggcatctgctattcttaggctttgggagaaaagtttagttgcaaagattggtgtcaagcgtggtattgtgaatacaaacaatgaactgatggctcaggaactgaaggcattaacaggaggtaccttactcctaaggaataaatattacattgtaatatatcgtgggaaggactttgttccaaccagtgtggctgctgttattgctgaaagacaggaattgacaaaacaggtgcaggatgttgaggagaaggtgcggtgcaaagctctcga

SEQ ID NO: 9897 - DNA, 237 bp, Glycine max
  Clone ID: 701103016H1
cggagatgggagtcaggtttgggaactggtttgagcaccggaaacctcagtgacactttcaagaaccaccaccacgcccaacccatcgacttcggctgaattccatttccctaattcccgcaaatgggtgctagggttcccgtgcagcactacactctcaactccccctcttccttcatcgacagccgtctccacgtcttcaacgccgtcgacgcccgagaccgcgcctccgccatc

SEQ ID NO: 9898 - DNA, 178 bp, Glycine max
  Clone ID: 701103017H1
ctcattcttatttctctcctctcttcactttcactctctctctctctctcagccatcatcatgggagcagtgattctcccagatctcggcaccgagattttgattccggtctgcgacatcattggaatagggttcgccctcttccagtgggtcctcgtctccaaggttaagctctccg

SEQ ID NO: 9899 - DNA, 265 bp, Glycine max
  Clone ID: 701103018H1
caaaaattgctcggagggaggagcgattggcccaaggtcctggagaaaaagtatccgctgcacccagtgctacagctgctacagcatcacagccagcgcaagacccaaagaaatctaagaagtgatccacatattctgatattggcttgtagaatttttgggtctggcattttgagttgctgttctaaagtagttttgacgagttttgaggagtttgtgttggtttagacctttagtttttatttaagtatatgaacttataaca

SEQ ID NO: 9900 - DNA, 267 bp, Glycine max
  Clone ID: 701103019H1
gagctctgttgatgtataccgcaaagtgatttccttgaatctgtattgcaaagttattctgtaactcttaagtcccttttgatcaaaaaaccttttacaatcatctcactcatctcttccttgccttgaatcaatgggatccaatttctttgttgttgttccttgttatgtccgtcagatcagctgaagaaacccatccccagcttgtttcaagctcttcttttcaacttagcctctttaaacattttagttgtcattagtttctag

SEQ ID NO: 9901 - DNA, 266 bp, Glycine max
  Clone ID: 701103020H1
ggggaagagattctttaagtaagtggtttacttcatgcaaaatgattggacttgcagccgaacatggatactttctaaggtggagtaaagattctgaatgggaaaccagtcccttgtctcctgatcttgattggaagaagattgtggaacctgtcatgcagttgtatacagaggcaactgatggatctaatattgaaactaaggaaagtgctttggtctggcatcatcaatatgcagaccccgactttggctcatgccaaggcaaa

SEQ ID NO: 9902 - DNA, 265 bp, Glycine max
  Clone ID: 701103023H1
cagaagaagatggagaagtatcagatctggagcaggagaatagcgttggcagcgtttgcgtttgctctgctgttccaatcggcctcagcagacgacgtcgttgtgctctctgaagataacttcgagaaggaagttggtcaggacagaggagctctcgttgagttctatgctccttggtgtggacactgcaaaaagcttgctccagaatatgaaaagcttggtagcagcttcaagaaagccaaatctgttttaattggcaaggttg

SEQ ID NO: 9903 - DNA, 267 bp, Glycine max
  Clone ID: 701103024H1
tgacaacaaaatcctctctgcttccaacaacatctcaaccatgggtacttgggttcttcaacaagtgacctctattgattggaattggaaccatgaatcctacccagactttcgtgatttctctgttatacccttcttcgctctcttcttcccctcccttcgcttccttctcgacacgttcctattcgagcaagtggccagacgattgatttttggaaagggacacaagaagatggattttcaaacacttgagagaaaaaagaagat

SEQ ID NO: 9904 - DNA, 270 bp, Glycine max
  Clone ID: 701103026H1
ccctcgagccgattcggctcgagccgccttaagcctttgattcccaagctctcccttcctctaccattgcacagtgatcgttaccgatccatgacgacaccaccgtcttcctcctcagcttcgcaatcgcagttcgcctattcaaacccctcctcctcctcctcctacttccccgttccctttcaccttcagcaacccgcaaccactcactacgctgcgccctacgtcgccgccccctccgtgcaaatccccgctcctccagtcgtcggc

SEQ ID NO: 9905 - DNA, 264 bp, Glycine max
  Clone ID: 701103027H1
tttgaatctctctggctccaaaaatctaattaaaatgccatacattggagatgccctatatcttgagagtcttgatctcgaaggatgtatacaactcgaagagatcggtctgtccgttgttctttcacgaaagcttacttctctgaatttgagaaattgcaaaagtcttatcaagttgccacggtttggagaggatctaattcttaaaaatctagatctcgaaggatgtaaaaaactcagacacattgatccatccatcggtct

SEQ ID NO: 9906 - DNA, 262 bp, Glycine max
  Clone ID: 701103028H1
cagcacagcactcggaaatttctggcgatctctgcgttttcccctattttttctgaatctaacaacaaacattcctctggcaacaatcaatactattaataagagttccttccttcactctcacccaagccaaagaaaggaacaagaacaagaccaacaaagtaacgtgaaagagaaagagatggaggaaattgttccagtggtggatttccagaggctttcagaggaagaggagcgcaagaagctgagaaaaacatgtgag

SEQ ID NO: 9907 - DNA, 267 bp, Glycine max
  Clone ID: 701103029H1
caaacattataatttctattacatacattttgtagctaggatgagcaagttactactcattcgtgttgctgggttcgtggcaacctttgtcaccatggtgatgatgatggtgcccaaacgtgagtgcccaaaacataggtgatgacatcgtcacacaagacttcttcaacagcataatcagtcaggctgatgatggttgtgcagggaagaacttctactcacgagatgctttccttaatgctcacaattcctacaatgagtttggta

SEQ ID NO: 9908 - DNA, 270 bp, Glycine max
  Clone ID: 701103030H1
gcaaatagtccatagtgaaacttccaacctctcctcacctaacctaccattcatccaattcttcttccatattcccttattcccatgttgttttgatgtatgctcttctctctaaacatggtgctgcatcacagaaagcttttattgtttccaccaccaccaccaccactctgtagaagtgcctgtcctgagaaatttaatgaccctctacccccacctaactccccagatgattatttgacccaaagtcccaccaggaacatcaaaatc

SEQ ID NO: 9909 - DNA, 271 bp, Glycine max
  Clone ID: 701103031H1
ttctgttataacatctcttgtcattgcattgaggtttgagtattgagagcatttcaaaacgccatggctaacccaattccaattcgtccatggtctcgcttggcctctctaagatcttctcctgctccagagtcacatcctaaacctcacactgcagaaccttctctcaaaacaacaaacattttttctaatgacaacaatgaaagtgccaccaaatctctatcaccaacaccaccagatgttcacatcccaattcaacaaaacctcaaac

SEQ ID NO: 9910 - DNA, 271 bp, Glycine max
  Clone ID: 701103032H1
gaaactcttccgccatacctcacctcagatctacgtcgtcgtcgtcgatcttctgttcagaataataattttagatccctgatgcaacagaacaaggaatcttcttagattctttttctggaagaaagagaaaacacaagaagaaactcttcttctttagacccgtcttatatatttatatacagtctctgattgatcggttttttcggaacctctattttcactcaaatccacgcgcgctcttcgggcatggatttggacgatttccgat

SEQ ID NO: 9911 - DNA, 271 bp, Glycine max
  Clone ID: 701103033H1
gaagaaacaaggagagtacgagcctccagaaagaccagatcctgatacagattatatcagagctcaggaggcccggcgcttcatgatttatgttcatgccaagatgatgatagttgatgatgaatacataatcgttggatctgccaacataaaccagagatcaatggatggtgccagagattctgagattgccatgggtgcttatcaaccatttcatttggctgccaggcagcctgccaggggacagatccatggtttccgcatgtcgttg

SEQ ID NO: 9912 - DNA, 270 bp, Glycine max
  Clone ID: 701103034H1
taaacatcaatacccaccatctctatgtctctctctcccccatttactcttcctttgctttttattccttttcagttaaacttcttaattaaaaaaaatatctaagtaaggtcacaccttaccctctattagtgtttcagaaacatagaaaaactcaatgaccagttttatgttctcataaacagtcatatagctaggaaagctacactgggaacagatgtctccaattccaaagcagtttttaggttgatttcagaagcaagccacttt

SEQ ID NO: 9913 - DNA, 265 bp, Glycine max
  Clone ID: 701103036H1
cccaattccaaattcaagaaattttttaaacttgacatatctgctatcaccttttccgtttcttgcgattcgacgatggccgatcaaaagctttcagaaccggcgcttaaacgtgagcagcttgatgaattcgtgagtagtctatattttgaacaacgaattcttgaactccgacttcttcaagacctcgagaacaatgatgaatgtaggaaaaatgggagcgtgaaaaggttaaatgaccagagtgatgtctgtggatttagaa

SEQ ID NO: 9914 - DNA, 264 bp, Glycine max
  Clone ID: 701103037H1
gctatagctagaagtccctccaatccctctttgtctttgtgcttttctagttccttccaaaataccaacaaaagcaaagacaatgagttgccaagcatggcccgaacccatagttcgagtccaatccttagctgaaagtggcctaagttcaatcccttcacgctacattaggcctcactcccaaagaccctccaataccacttcttttccaactcctaaaccttttcaaactgatcatcatcatggtcatgatcagaaaacttc

SEQ ID NO: 9915 - DNA, 261 bp, Glycine max
  Clone ID: 701103038H1
cctgtctctctctctcggtctcgctcttcttctcatcaagcacagagttacagactcaccgatcttccgattctctttcgtcttggtttatgagctcgaaggagagacccactcttggtggcacgcggattaagacccgcaaacgaaatattgctgcgccgctggaccctgcagcattctcggatgcagtggtccagatttatttggataatgctggtgatctggaacttattgctaagagtattgaatcttcagacctta

SEQ ID NO: 9916 - DNA, 262 bp, Glycine max
  Clone ID: 701103039H1
cgaaatcaccttccgctttctctccattgttctctccgatccaagaccttactccaaccacagagaatggactcgcaggatagagtctcttatcacacatcaaattgaaatcattgccatacttcgtgaagatgaggaacaaaattccgacacacgtggcactgcaccaaccgctgatctcagcaggaacaatagcagcgagagcagaagctacagcgaggcaagcctgcttccgcggcttgccacgtggtacaaatccaag

SEQ ID NO: 9917 - DNA, 264 bp, Glycine max
  Clone ID: 701103040H1
ctagaactcacaaaggacagaagaaacgcgaatgccaggagaactccaattaccacccgggttcagattccaccccactgacgatgagcttgtgaatcactacttgtgtagaaagtgtgctgcacaaaccattgctgttcccatcatcaaagaaatcgatttgtacaagtttgatccatggcagcttccagagatggctctttacggtgagaaagagtggtactttttctctcctcgagaccgaaaatacccaaacggttcgag

SEQ ID NO: 9918 - DNA, 264 bp, Glycine max
  Clone ID: 701103041H1
ctccctctgcgcaggaattgggaacattcgacaggtagagtttcttcaatggctcctaaagttgataagaagaacgacccaaaggcacaggccttgaagactgctaaggcagttaagtctggtgctacctttaagaagaaggcaaagaagatccgaacctctgtcactttccacagaccgaggacattgaagaaggataggaaccccaagtaccctcgcattagcgcgcctccaagaaataagcttgatcattatcagatcctg

SEQ ID NO: 9919 - DNA, 265 bp, Glycine max
  Clone ID: 701103044H1
gataaaggtgttgcatggcttgtcaaaacacaatatatatctcctctaagcatggagtcaacaaagcagtctttaactgagaaacaagctaaggagctgagagagatgaaaggaggtcgtggcattttggacaatctcaacagtagggaaagacaaatcagggaaattgaagcatcatttgaagcagctaagtctgatcctgttcatgcaaccaacaaagatttgtatcctgttgaggttatgccgttgctgcctgattttgata

SEQ ID NO: 9920 - DNA, 263 bp, Glycine max
  Clone ID: 701103045H1
gcgaaagagtattattcaatattttggttgggttgaatcccggggttgaagcgttgcagacatcacggctattctaagagtgtctcgctccctcattcatgtccgatctgtacgacggaggacgggtagttgcgtaactgccgttaacccttcgccgcacggtgggcgtggtgctttgccttctgaaggtggtagcccttcagacttgctcttcctcgctggtggtggtttcttctagtttcttcactcttttcattactttt

SEQ ID NO: 9921 - DNA, 266 bp, Glycine max
  Clone ID: 701103046H1
cacatcttaaccttgttcttaccagatggctgcctcagttaaactcttatttttgtcctttctctcgttgttcatctctttctccatagctcaaacctctttcagaccaaaggcacttgttcttcctgtaaccaaagatgtttctgcctcagttcctcagtatgtcacacaaatcaaacaaagaaccccacttgtggcagtgaaactaactgttgatcttggtggtggctacttgtgggtgaattgtgaaaagggctatgtctcat

SEQ ID NO: 9922 - DNA, 268 bp, Glycine max
  Clone ID: 701103047H1
cttgcatcaaaggtggatgcaatcaaggatagccttgataatgatcaagaaaaagttggagctgatattgtgaaaagagctctaagttaccctttgaaattaattgccaagaatgctggtgtcaatggtagtgttgtcagtgagaaggtattgtccagtgacaatccaagatatggatataatgctgccactggtaaatatgaagatttgatgtctgctgggatcattgatccaacaaaggtggtcagatgttgcctggagcatgcag

SEQ ID NO: 9923 - DNA, 269 bp, Glycine max
  Clone ID: 701103048H1
aagaaagcccatatcatggaaattcaggttaatggtggtagtattgcacaaaaggtggactttgcatacagtttctttgagaaacaggttcctattgatgcagtgttccagaaggatgagatgattgacatcattggtgtgaccaagggtaaaggttatgagggtgttgtcactcgttggggtgttacccgccttccccgtaagactcacagaggtttgaggaaggttgcttgtattggtgcctggcatcctgcaagagtttcattcac

SEQ ID NO: 9924 - DNA, 266 bp, Glycine max
  Clone ID: 701103050H1
gcaaatccacattcctctccatgtccggagagccaccacggccgttggagatccacctgagggtcaactccaagagaggcggcaccaccatggtgcaccccgtggacacggcggttccggttcagtaccccagagatgaggagggagtgaagcattacagaaaatggtttgcttggctgatacctctctttgtggttgccaacgtcgctatggttgcgatcactatgtatgtcaataactgcccgcgtaactctgtctcctgcatt

SEQ ID NO: 9925 - DNA, 262 bp, Glycine max
  Clone ID: 701103051H1
aaaaaccgacacaaagatctagtcctagctagaatcaaacaggggcgatctcaccttcaagaacacatcgccatggcaaggaacttgcttcttgtgctttttgcagtagccaccctcctccatggctcagcagcccaaaccagacacatggtcggtgatgccacgggctggatcatccctgctggcggcgctgccacctacaccgcctgggcttccaacaaaaccttcaccgtaaacgacactctcgtgttcagcttcgcca

SEQ ID NO: 9926 - DNA, 261 bp, Glycine max
  Clone ID: 701103052H1
aattttgtcactgtaattcttcttcttcaaagaaaaccccaatttcgaacgcttcaaattcaattcaggaaaccctagtgattaatttcgttgcgaaacggcgattcaagattatcgtgagccagaagatggtagcggaagcggaaattatctgtcagcagaacattccgatgttggacgtgaagtatcatatttgcgtggctcaagaacacaacgtgaaggttgaggtttcacccaaatcaccttcacctcctgttccga

SEQ ID NO: 9927 - DNA, 264 bp, Glycine max
  Clone ID: 701103053H1
ctcgagccgctcgagccgtgtctgtggggtttgcaaaatgggaactcgaacaaatttctaccagaacccaccaatctcctacaaaaaacgtttaagcatctcctccgttcttcagaacctccatggtccattccctttcctctttcaaactctctctatctcattcgatgctctaacttaatcaattttcaaattccagcttacaacatcgccgccggcaatgttcctcccgccgatccaccgcaagcgacttccaccgccaat

SEQ ID NO: 9928 - DNA, 264 bp, Glycine max
  Clone ID: 701103054H1
gaaaataataattagtagcataataattaagccaaagtgttcatagatatggagggtcttctgcctcttgtttataaagcaatcaagagaaacaaaacacgaaggcaatacgagtgtctttcatcaggaacttctctagggtacaacatcagcatggccgagatgtaccctcaaactcaggaacatgtccttcagaaccagacacatgcccagaaagtgtttcaccaccaccataatgaaagtcacaaaattggtcacaggaga

SEQ ID NO: 9929 - DNA, 265 bp, Glycine max
  Clone ID: 701103056H1
gaaaaaaccgacacaaagatctagtcctagctagaatcaaacaggggcgatctcaccttcaagaacacatcgccatggcaaggaacttgcttcttgtgctttttgcagtagccaccctcctccatggctcagcagcccaaaccagacacatggtcggtgatgccacgggctggatcatccctgctggcggcgctgccacctacaccgcctgggcttccaacaaaaccttcaccgtaaacgacactctcgtgttcaacttcgccac

SEQ ID NO: 9930 - DNA, 260 bp, Glycine max
  Clone ID: 701103058H1
cttcctttgtaatagaaagcacgcgtttctctctctccctctctcaacgaatatttgtgtacttcctcttttgtgggtagattcaatttaccatgtcgagttcatcggaatactctcaattttccggccagaaaccggcgaggtcgccggagaaatcgagcttctctcagacttgtagcctgttgagtcaatacatcaaggagaagggtagcttcggagatcttaccctcggaatgacatcatgtgggtcacctgagaca

SEQ ID NO: 9931 - DNA, 262 bp, Glycine max
  Clone ID: 701103059H1
caaaggcagaagcgagatctcctagaaagcgagtttctcttttctctctctctttcaattttcacatagtcagcgaaaacaaacaaactattggagatttggagcacgaaacacaacacaagcagcagccacctcgtttcattgttttgaattcaactgagaaaaacgacaacgaggatgtttcaggagagcagcgtgacgcggtggccgactcagtggactcgctaccacgacaagctattcgagcgggcccttctggtcg

SEQ ID NO: 9932 - DNA, 264 bp, Glycine max
  Clone ID: 701103060H1
cctcgagccgaatcggctcgagggggagaaagggagaggcgcgaaactgagcggaggcacggacgaagaagaagggagcgagactcgtgatcgattgcgcgaagcggtggaggataagattatggacattgcttctctggagaagttccttcaggagaggattaaggtcggcggcaaggccggtgcactcggcgattccattaccgtcaccagggacaagagcaagatcaccgtcacctccgacagcaacttctctaaacggta

SEQ ID NO: 9933 - DNA, 264 bp, Glycine max
  Clone ID: 701103061H1
aattcgtacagtttcagcttaccgttaatgtggttgcattaatagtgaatttcacatcagcctgcttgacaggaactgcacccctcacagctgttcaactcttgtgggtgaacatgataatggacacactgggagcacttgctcttgctactgaacctccaaatgatgatttaatgaaacgttcacctgttggaaggaagggaaatttcatcagcaatgtcatgtggaggaacatcttaggacaatcattgtatcagtctatgg

SEQ ID NO: 9934 - DNA, 266 bp, Glycine max
  Clone ID: 701103062H1
catgatcttaagtcattatatttttagttagattgtttccctacatggtactgggagttatgtttaatttaagtgctaatgcctcttgggactctgatggttccacattttgaaagagatgatagataggtaagcaggatttacattacaattcattgtcttctgatacattggcctttttcaaattttgagggaactgagcaatgtaaagagtttctattattttcacctatgtgatatataccagagcaggcagtgcaaaacag

SEQ ID NO: 9935 - DNA, 269 bp, Glycine max
  Clone ID: 701103063H1
cagacttaacaacagcacaaagcgggttactgtctgttcaagctaccatctctctctctctttcttagtgcctccttgccagaagttaaaatggcccaagaaactttcctattcacatctgaatcagtgaacgaggggcaccccgacaagctctgtgaccagatctccgatgctgtgctcgatgcatgcttggagcaggaccctgacagcaaggttgcctgtgaaacctgcaccaagaccaacatggtgatggttttcggagagatcac

SEQ ID NO: 9936 - DNA, 248 bp, Glycine max
  Clone ID: 701103064H1
acgcaaccccctcttttagcgttcgaacaaaattagggttttctcaaccctagggtttaccttctcttcccctgttcgaaattaggcaaatcaaaacagaaacacgactacaaaaagaagaaaagaagaaaaagaatcaatcattcattgatcgctgaaacgatacgatgacagggaaggcgaaccggacgaagcacacggcgaaggagatcgcgtcgaaggtggacgcggcgaccacgaaccgcggc

SEQ ID NO: 9937 - DNA, 266 bp, Glycine max
  Clone ID: 701103065H1
gcctccttcagattggatggattgggagaagcgctattataacaagtatgactccatcatatgtgaagcagtgggagttttgcagtcccaattgatgaacaccaggccaagtttggctcttggggccatggctttggttgcaatcagtgttccaacttcttctgctgtgcttttgtttcatttggttgcattggccaaggttgttttggctggggctcatcttggctagctagactagaatattgttcattagatgctttgaattt

SEQ ID NO: 9938 - DNA, 265 bp, Glycine max
  Clone ID: 701103066H1
caatcgcgtaaactggggtgatggtgggagtgctttttctttgaaggatgcgaattcacaaggcaatcagtcaaccagagacataggtgttcagtttaatgctgttgagtttaaaaggtccactgaagaattgaaattgcgttattctaattctaacgaggaagcagttaataaaaccgcaaaaaagaagcggaaatcagaaccctatggcgaggaaccttctggtgaaaatgaagaggaggcaaaatgcgctataggttttatg

SEQ ID NO: 9939 - DNA, 261 bp, Glycine max
  Clone ID: 701103067H1
gcaaattcggactttgcaccatgttttgggtggtacacttaacccgaatgctgcatacctattcatcagaggcatgaaaacgctgcatctccgtgtacagcagcagaattcaacaggaatgaggatggccaaacttttagaggcacatcccaaggtgaagcgggtctactatccaggcttgccgagtcaccctgaacatgagcttgccaagaggcagatgactggtttcggtggtgttgtcagttttgagattgatggaga

SEQ ID NO: 9940 - DNA, 263 bp, Glycine max
  Clone ID: 701103068H1
tctaacctcatcactcctcacacaacacacttgcctcttctacctccctccacttctagttcttcccacatggaggatttaatcatatctccttcttcgtcttcctctttggtctctctaccccatgaaaacccaacaccaacaccaacccttctacaaaaactccaattcctcctccaaagccaacccgattggtgggtctacgccattttctggcaagcctcacacgacgacaatggcaacctctacttatccttcggaga

SEQ ID NO: 9941 - DNA, 260 bp, Glycine max
  Clone ID: 701103069H1
ctcgagccgtgctaactaaacactaccctgctgcaccaaagtgccaagtcacacgcacaacaattttcttttctttctctctcactctccaacttgcacccaacccaataataacaataacaaactcaacctcgccaggatccaacacaacgcactccttacacagaccaagattctcccccagtggtgcagttgaagggccgtgaggatgttagagaaagtggaggagtttaacatggataaagttatacaagagtttg

SEQ ID NO: 9942 - DNA, 262 bp, Glycine max
  Clone ID: 701103070H1
ctgtggagagcttgttttctcttgttcattcatctcacttccaatacaaggaacaagctttccaccaatttgaatcaccaatggctcgctctttctccaacctcaaggttctctctgctcttgtcgccgacgcattctccaacactctcaccaggcgtgggtacgcagtagcgacacaaagcgcaacaagaggaggagcagcctccatcagcggcaagtcaggggaagacaaggtactaggaggaggtgctgaaaaggtttc

SEQ ID NO: 9943 - DNA, 258 bp, Glycine max
  Clone ID: 701103071H1
gatctgctaacctggcttcagtctacattatcgaagacaattctatcgctggtgcttccatgcactcattcctaccaagtctgggagaaaattcttgagtacttccatttgcaaacacgagctcgagctcagcaattgcgcagagaactgcgtcgcacaatgcttgatgataagacgatgaaagagtttcttctgagaatcaaagcgatctgtgattcgcttaatggtgtcagagatccggtgtcacatcacgaacac

SEQ ID NO: 9944 - DNA, 260 bp, Glycine max
  Clone ID: 701103073H1
cacttaccagtatggctatccaacaatctctgttagacaggcctagaaaatctgtttccaaaactatctgcttaatcctttctatagctgctgtcatgatctcatcagcctttgttggttcttatctcatcaaatccacctccttcttcaaccaatcctctcctcaacatctctgtgatcatgcacttgatagggcaacatgtttaacccatgtctcagaagtggtacaaggtccgatcttgacccccacaaaagaccac

SEQ ID NO: 9945 - DNA, 253 bp, Glycine max
  Clone ID: 701103074H1
cgaaacaattttgatttgtgtcgaggaaaggacaggtcttagaacccttcttttcttcctcgtgtgcgtgaaaacgaagcaacgccacacgatggtgttctacttcaaagcgcgccctgaagccggcgatttcaccatcttcatgggcctcgacaagttcgagaacgaggaactcatcaaatacggttgtcccgaagacatctggttccatgttgataaaatgtcttcagcccatgtctatgtcaggctgcac

SEQ ID NO: 9946 - DNA, 263 bp, Glycine max
  unsure at all n locations
  Clone ID: 701103075H1
ctcgagccgctcgagccgattcggctcgagagattgggttggtagatactgctgctgtctaacacagcattaccnggtccctatggttcaagaaattgcacggttggagttattcacaagtgagaaatttcctaagctccacaattggagccaagaatttttgaaccatccaattgtcaaagaaagtctgccccctagagatcctgttttctcctttttcaagggtctctatgaaagcctttttggttcaaaatagatttgat

SEQ ID NO: 9947 - DNA, 261 bp, Glycine max
  Clone ID: 701103076H1
gcggtgaagtccgccgttgaagaggttctgggatggatccggattctgaaccctaaaatcgtgacggttgtggaacaagaagccaaccacaacggggaagggtttttggagcggttcacggaggctttgcattactattccagcgttttcgactcgctcgacgcgtgtccggtcgaaccggacaaggctgctttggcggagatgtatctgcagagggagatatgcaacgtggtgtgctgcgagggaccggcgcggctggag

SEQ ID NO: 9948 - DNA, 263 bp, Glycine max
  Clone ID: 701103077H1
attattctttctcagactccttcactctgtgttgtcgtttctgtttcttcagcaattcttctcatcgtaggggaaaacatgaagttctgcaaaaagtatcaggaatacatgcaaggccaggagaagaaacttccatgtgtaggattcaagaagctcaagaagattctgaagaagtgcaggagaaactcttcatccctgaaaccccttaatgcatcccttgccgccaaaacctgccccgaccattgcccagtgtgcgatgggac

SEQ ID NO: 9949 - DNA, 261 bp, Glycine max
  Clone ID: 701103078H1
ggtaactgcccatatatacacatgagattcgcaccttcctccaagttcttaggcttttcaaatctctttcactatcttatcgcaccctctttctctccgaccccaaagttctcatcttccatttccgctaccatgtccactttttccactcagaacgacaccctcatccacaaaacgcagcaacctttgcagatcgcaaagcgcttagaaaaatttcagacaacaatcttcactcaaatgagcttgcttgccatcaaacat

SEQ ID NO: 9950 - DNA, 266 bp, Glycine max
  Clone ID: 701103079H1
cagatgctgattctcttgacttcaactgtgggagcaaacacacactttatttgagggaggatattatggatatggaagctgcagccaagatgtttgagcaggaagatgggatattggatgagataaggaagcaaactaaaagtgaccagaacatgtatgcatatcctttgtcaaatatgtttcagggagccgaggcaaatggatacacgccttattgtgagctaaaacttgattctgttgctgaattttatgcaactccagagcac

SEQ ID NO: 9951 - DNA, 260 bp, Glycine max
  Clone ID: 701103080H1
tggaaactcagggattggtggtggatggcagctagcatggaaatggtctgaaacagaaggtgttttcaagagaatatatttgcaccaagaaggtggtcctggatctagacgtgggtccatcatttcacttccaggctgtgatgcgccgacactaacagatggtgagattgtccaggctgccgctctagtgagtcaatcagccctttacaacaaggagcttatgcatcagcagccagttggaccagccatgattcatccat

SEQ ID NO: 9952 - DNA, 262 bp, Glycine max
  Clone ID: 701103081H1
tcccacgccacggtgctcctccttgcacttttactgcgttccactgttcttcatcttccttctggtcaatggttgctctacaattattctatttttcccattcagtattcttcactaggtgcaagtattcctcttagcgccaatcttcagcaaatttgaatacttttcgcggattcatcatttttaatcttgtttgggctctgaatactcaaggggttttaaggatatttcgttactgggtatcattttctcaaaaaaccat

SEQ ID NO: 9953 - DNA, 265 bp, Glycine max
  Clone ID: 701103082H1
cttctaaaccttcatcaaacataactctcttcctagagaaacataacatatttttatagcataggacttatttgattcttgttaattcacaccacaaggataattgacatgggatcaagcttctctagttgttatgagggtgaatctgtgtctccttctccaaagccaaccaaagtggtggctacgaagggtggttcttcttccaacagggtctctataacggacttgagttttcctggctcaacgctttcggaggatctctccg

SEQ ID NO: 9954 - DNA, 263 bp, Glycine max
  Clone ID: 701103083H1
gcttggagcacaagaaagctctttactgaactgtacaccaaaggaagacttcggaggaggacacccagaccccaatttgacatatgcaaaagagttggttgctcgtatgggattgggcaaatccgaaccccaagaagagcccccagagtttggtgctgcttctgatggtgatgcagatcgcaacatggttcttggtaaaaggttttttgtcactccttcagattccgtggccattatcgctgcaaatgctgttgaagctatac

SEQ ID NO: 9955 - DNA, 258 bp, Glycine max
  Clone ID: 701103084H1
cgatgatgatgaggaagagagcaagaccaaaaagaagtcatcagcacctaagaagagtggaagagcacaacttggtgatggccagcagggtgagcgacctccagagtgcaagcagcagtagaagtatttatgcagaatgtcatttatgtagttgagttttgttggtgttcgagaatgtcctaatgtgaaagtgggtttcatgttgttttttaatgtctcttaaattgattttcctccctatatcttggcagtccgaat

SEQ ID NO: 9956 - DNA, 259 bp, Glycine max
  Clone ID: 701103086H1
cgcgtttcggagagagacgtcgcaatggggaggaggcctgcaaggtgttatcggcagataaaaaacaagccataccccaaatcacgcttttgccgtggtgttcctgatcctaagatcagaatttatgatgttggtatgaagaagaaaggtgttgatgagtttcccttctgtgttcatctggttagctgggaaaaagaaaatgtttcaagtgaagcattggaagctgctagaattgcatgcaacaaatatatggcgaaat

SEQ ID NO: 9957 - DNA, 259 bp, Glycine max
  Clone ID: 701103087H1
ggaatatttgtgctcagaaagttaattctatggtcatttgactcatatactttttgttgaccttgctctaatggtttttgctggtgctaaacctctgttggataaaacgcttggcattcttgtggaaggcttgattgacacattcatcagcatttttcatgaaaatgaagctacagatcttagtgcaattgatacaaatggattctgtcagctcatgcttgagcttgagtactttgagaccatattagatccatatttt

SEQ ID NO: 9958 - DNA, 219 bp, Glycine max
  Clone ID: 701103088H1
caaaattaatcatcttacttatttattccaaaaatggttgatttacattggaaatcaaagatgccaagttccgacatgccttccaaaactctaaaactctctctctccgacaacaagtccttaccctctttgcaactacccttccgcaccacagatatctctcacgccgcaccttctgtctgcccacactacgactactatctccgtcttcctcaactc

SEQ ID NO: 9959 - DNA, 259 bp, Glycine max
  Clone ID: 701103089H1
ataaaaaaggttaattagtaaagtcacacgtgctttctaacggtggcgcaccagaggggtttaggttcaggttcgggcgaagttcttggcggcggaacaaggcggcgatgaggaaacggaagagagtactgtaggttcggttccgagccatgtggtctctgcagcttcggcccaaaccaataatcagtgggtcccggcaagtggttctccaatgatgtcacgttttatgaatgctccttcctctccaggattgtctcct

SEQ ID NO: 9960 - DNA, 261 bp, Glycine max
  Clone ID: 701103091H1
ctcgagccgcaaaaagattagctttatactatctgcatttcgtggtcaagttgctactctaacgatgcatccttatggatgccgagtcatgcagagagttctagaacattgcacagacgagagtcaatgccagtttattgtagatgaaatcttggagtcagtctgtgctcttgctcaggatcagtatggtaattatgttacgcagcatgtcttggagagaggaaagcctcaagaaaggagtcaaattatcaacaagttgtc

SEQ ID NO: 9961 - DNA, 262 bp, Glycine max
  Clone ID: 701103092H1
gaaattagaaatatttattcattgtcaccaaatcttgttccctgcaagagaaagaaagaagggagagaagaagttgttgggttgagttggattggatttctaatctaatctatacctttcttttttcctatgcttttaaggcacaaacccttctttcttccctcttctttcttcttcttattgttattccttgcctttaccctttagggaaggaagaaggaacaactatactactattatccttattattgttattattgta

SEQ ID NO: 9962 - DNA, 261 bp, Glycine max
  Clone ID: 701103093H1
gaaaaacacaacaatggggaaccaatcctcttcaaacaagatagaaactcttcccatcgacacaacatttaagcctccagcaaatataccagtttggccacaaggtggtggatttgctactggaaccatcaacataggagggctaaaattgtttcaaatttcaacattcaacaaagtttggaaaaccttagaaggtggaccaggtgatgcaggggcagctttctttgagccagcaggaatacctgagggattcttcacact

SEQ ID NO: 9963 - DNA, 261 bp, Glycine max
  Clone ID: 701103094H1
cggtgctgaagtggtggaatgtgcctgtgtcattggtgtgcctgatgtcaaggggcagtgcaggcgtattggaaagccactttatgttcttgttgagccgcgtaaagcagataaatgttacccagattgacatactaaaggacgctgggtgtgagccacacaggccataatgtgatccttaagttttaggctgatggagtcgtgttcatggcaattgtcaaatatcatcctgggaaatgttcatcctgtttcatatcttta

SEQ ID NO: 9964 - DNA, 264 bp, Glycine max
  Clone ID: 701103095H1
ctcgccgactcggttgctatcagcgagtgagagtgagtgagtggttctcttgcagcaacaacgtttagtgacaccaaacagacgggaaatgggtcgtggggtcagtgctggtggtggacagagttccttggattatctctttggcagtggggtacctgccagcagtgcaaatggtgctcgcactcaaaatgcaagtgctccttcaccaccggttgataagcaaagtcgagcaccagcaccagcaccaggacctgcacctgcagc

SEQ ID NO: 9965 - DNA, 257 bp, Glycine max
  Clone ID: 701103096H1
gaatgatgagtgtgaatgacaaccaaactggttcgaaatatatgggtaaccaatatttctataatgattcagtagtggttgtaatgaaaggtcaatacatggagctcgagaggatattaactatttttacaaccattgaattatcaaataatatgtttgaaggagaacttctgaaagtccttggcgaattgcattctctcaaagggcttaacctttcgcacaatgcaatcacgggtaccattccacgatcctttggt

SEQ ID NO: 9966 - DNA, 251 bp, Glycine max
  Clone ID: 701103101H1
ttcagtccctgccctaagcccggaaaacgacctcttcataatcgtgaagtgcttcgccgccggaatcatcctcggcacggggttcatgcatgtgctcccggattccttcgccatgctctggtcggattgcttgaaggagaagccgtggcacgagtttcccttttcgggcctggtcgcaatgttctccgccataatcacgatgatggttgattccattggccacaagtgtttacaccaagaggtgtaggact

SEQ ID NO: 9967 - DNA, 203 bp, Glycine max
  Clone ID: 701103104H1
gttaggttctgcacgatctgcttccagcgagtgttctttcttcgcttcaacaccttaatttgcacacggtgcttactcagcttgagaaatggcacaagaaatctttctattcacatctgaatctgtacacgagggtcaccccgacaagctgtgcgaccagatctctgatgcagtgctcgatgagtgccttgaagaggaccctg

SEQ ID NO: 9968 - DNA, 264 bp, Glycine max
  Clone ID: 701103106H1
cacttcctctcattctgttttgactttgtcaaatggcctttgcaagtgtcgtacacattgtcgcatttcttcttgctagaagctctttaagctaattatgagctccgttctcctctgctttgtcccatctgtgaagatgtatgcaaagaagtggaatgtggacaaggaacatgtaaaccttccaagaacagcactttcttctttgaatgcgagtgccacccgggttggaagagagctcttgcaaatgataagatgggtttgaag

SEQ ID NO: 9969 - DNA, 260 bp, Glycine max
  Clone ID: 701103107H1
gtttggaaaccttagcaggtggaccaggtgatgcaggggcagctttcgttgagccagcacgaatacctgacggattcctcacactaggccactccagccaacccaacaacaagtccctttttggatcaattctggtgccaaaagatgagacatcatcatgtgacaataatggagctttgaagaaaccaattgattacacacttgtgtggagcagcaagtcccaacagatcacgcaagacaaagatggctatatttggcta

SEQ ID NO: 9970 - DNA, 255 bp, Glycine max
  Clone ID: 701103109H1
agcggcttttcttaggcgcaaagtatgaagtgttgttgaaggtcgaatgcagtttatgcagggtagtcacaatgcacttcatgcaatgaagttcactgatagctcatatattggatcgggtctcgtataaaatcgttattcaatgtcggaatgagtagtttatggtgtatgactaatgagatttcgggttcaacagtagggggaatattatgtgaggaataagtatgcatgatagactgctgctgaataaatcaa

SEQ ID NO: 9971 - DNA, 266 bp, Glycine max
  Clone ID: 701103110H1
gaccccagaagtggtttctgcagctccaattcaatcttctacagcaagcgtaagcccctcccactccctcccaacaacgccttagacgtcaccaccttcatctcctcccgcgcccaccgcgccaccacagccttcgtcgacgccgccaccgcccgccgcctcacctacacccagctatggcgttccgtggagggcgtggcagcctctctctccgtggacatggggatccgaaagggcaacgtggtcctcatcctctcccccaactc

SEQ ID NO: 9972 - DNA, 258 bp, Glycine max
  Clone ID: 701103112H1
tactcgagccgaatcggctcgaggccttctttaactaacatggttaactgtaggtgactccatcattcatatcttagtttccgagttatttagctctctcactcctttgattttaagtacatcgatttagcccctaaacttagtgcatcttttcgatgactgtcttgtccagatattcacgtgcagtcactattctcttcgtccatttcctttgatcacagagcaatttatcctaggctagtcttttgctttcccacc

SEQ ID NO: 9973 - DNA, 263 bp, Glycine max
  Clone ID: 701103113H1
gaattagggttttccaattcacagagcaacacaacgaaccaacaatggcgcagctacagacgcagtcgcagccgcagcacgggcaagcagcgctggagcaggtgcagtgcttcggtcgcaagaagaccgccgtcgccgtgacctactgcaagcgcgggcgcggtctcatcaagatcaacggctgccccattgagctcgtggagccggagatcctccgcttcaaggccttcgagcctatcctcctgttgggtaagagcgcttcg

SEQ ID NO: 9974 - DNA, 219 bp, Glycine max
  Clone ID: 701103114H1
gtagattagagccatgataaaggaattcaacacccaaaccgaggttagtgtgagattggaagccctctgggcagttctgtccaaggatttcgtcaccgtagctcaacaggtactcaccaatattgtgaaggatgtgcaagtgattgaaggtgatggaggggttggtaaaatcctcatctttaatttttggtctgatgtgtcccaaattaccaagggaga

SEQ ID NO: 9975 - DNA, 193 bp, Glycine max
  Clone ID: 701103115H1
agaaactccagcaccagcaccagaggatgatggattgagcggtatcccaattgcgcccagtgcgaacaacactaacaaacccaacgtcatcttcattcttgaaaaagcttctttggaagtcgccaaagtcggcaagaaatatcagctcttaacactccgacgaacatgcaattttcctcggaaaaaataacaa

SEQ ID NO: 9976 - DNA, 155 bp, Glycine max
  Clone ID: 701103116H1
gaaagattgaccatagagttctcgcgggaagctgacatactttccaagcttcaccatccaaatgtggtggcattttatggtgtagttcaggatggaccaggagcaacattagcgactgttaccgagttcatggtggatcgttctcttaggaatgt

SEQ ID NO: 9977 - DNA, 51 bp, Glycine max
  Clone ID: 701103119H1
atcctcaggagatcgttgatcttttcaacaaacgattcctggataaacagt

SEQ ID NO: 9978 - DNA, 264 bp, Glycine max
  Clone ID: 701103120H1
ggagcgcttacaccttgcagaatcatctctacattcccaagggctcctactacgcagtaactccaagcccgatctcacatcaatctctcatttactcatcttaatcaatattaaataagaaaagatgggcgatatgtccaacttccaattgggtgtgattggtcgcgtatttatctctgtagcttcttctgtccccattgtcatctgcaacaaatgcttgatgcgcaatcttggcttcacttttgccacaatgcttactagttg

SEQ ID NO: 9979 - DNA, 264 bp, Glycine max
  Clone ID: 701103125H1
agaaatgattgcaatgaaaagcttatgaatctcccagttattcgagttcttttctccagtgagaagatccaagatatcatttccctgtgtgcaaattccattgtcattcttggacaaggaagcttatatcgctatgcaatttcctgaagctgctttgattatctttgtatcttttctgtggaaatcaatattcctggctcccttgatgttctaaagtgtacttgtgtggttcatcgataaattctatctttccatagtgctctg

SEQ ID NO: 9980 - DNA, 266 bp, Glycine max
  Clone ID: 701103126H1
ctttcacatcaactcaagagattcaaccaagtcatagaagctagctagggtgtattgttacatttgttagcaaaaaacttgaaaaaatggagagcagcttgggagacatgttgattaaggttgtggtgttcattctagttcaagccttggtgtaccttatcctctccaattcatcagacatcttcagcaaggacatgaagaaatccaacagcttcaggccagcgaggtcggtgagcattcgccggatgctggctttgatctctgat

SEQ ID NO: 9981 - DNA, 115 bp, Glycine max
  Clone ID: 701103127H1
aatgggctcgagtagcgacaagtaccgttagttcgcagttgacttatgtgcaatacgtgatttgaaagagacgacggatgcgctcagggaggtgctgaatggggaagtttggtta

SEQ ID NO: 9982 - DNA, 85 bp, Glycine max
  Clone ID: 701103131H1
ctactttatacatctgtataagcctttagtcatgtttgaaccaagggacatgtggaccaagctgaacgaaaagggtgagccaatt

SEQ ID NO: 9983 - DNA, 169 bp, Glycine max
  Clone ID: 701103132H1
tgagaattgggcattggctcagtcattctgaggcaggtggcgctgccaaacgcagaacctccgggagaaattgccaccgcaaagacgtggaagacgggtactagtagtacatctgccattatctcatattccctgtactaattacagcatcatgaacagcgagcgacag

SEQ ID NO: 9984 - DNA, 86 bp, Glycine max
  Clone ID: 701103133H1
ggctctttgttccagtcatcatggctgcagaggagtaatgcgtgtctgcaatgtcgccggaatcatcgccggcacgaggttcatgc

SEQ ID NO: 9985 - DNA, 262 bp, Glycine max
  Clone ID: 701103136H1
atcatgaattacatgagcatgagcttgtgttgaagcgccgcagggtgtattcctgtgatgcttgacatgacgaggcgcatatatggtcctactactgtggacgattgtgactttgatctccatccaaaatgtgcattggaaaaggcggacaaagcaggcagcaaagatgatggcaaggacgataagtccaaagatcactgggtttgtgcatggagaagtctgcaacaacacctcaaagctgcttgtcaagggttttggtgat

SEQ ID NO: 9986 - DNA, 138 bp, Glycine max
  Clone ID: 701103138H1
aatcgagccgaatcggctcgaagcttctatctgatttcagtccatatactcatggacatcttcactgggcgtagtgattatcaaccataattttagattattaagttttgggcttggggaaattatttcgattatatt

SEQ ID NO: 9987 - DNA, 109 bp, Glycine max
  Clone ID: 701103139H1
ggaggagtacaaattcgagtatggacccttggtttttgaacatgcagagcaaatcctagagacgacagatatatgcactataatacgtgactcgcagtcttcagatgta

SEQ ID NO: 9988 - DNA, 264 bp, Glycine max
  Clone ID: 701103141H1
acagaacctgccccgtcaccaaccaggtgctgacaaccttcgacatcatccccaaccacgccattcgcaggatgattcaggattggtgtgtcgaaaatagttcttatgggattgatagaatccccacacctcgtattcctatctcggcatacgaggtttccgacacgtgtaccaggatcttgttggcttgctagcgtggagatgataagaggtgtcaggagttggtcgggaagattaaggtttggagtagagagagtgagagga

SEQ ID NO: 9989 - DNA, 256 bp, Glycine max
  Clone ID: 701103142H1
tccacacccaacattctcacaagtcacagccaaacaccatttcattaattcttgcagaatattgcttagttttgttttatctgaatttggaaacagcttttgaatggctttttcaagagttgcactgctaatatgcacggtcgggtattttgtgattgcctctgccggcaatttccaccaagattttgatatcacatggggagatggtcgggctaagatactcaacaatggagagcttctcaatctgtcacttgac

SEQ ID NO: 9990 - DNA, 238 bp, Glycine max
  Clone ID: 701103143H1
gaacaatatgggtcaaatcgggttggcgctcggatacccagatatctcgctctttctgtctttgacaagtattttcgggtttttcggacggataatctcgggtaccgtttcggagttcaccatcaagaaagctgcaacacctaggcctctttggaatgcagcatctcagcttctaatggcggtaggttacatactcctggccatggctatgccacgttccctatacattgggtccatt

SEQ ID NO: 9991 - DNA, 111 bp, Glycine max
  Clone ID: 701103144H1
ctcgagccggctgtgggagagaatggatattacaagatctgcagacgtccaactgtgtgtggactagattccatggtgtcaactgtagatgctccatatccatccagccat

SEQ ID NO: 9992 - DNA, 262 bp, Glycine max
  Clone ID: 701103145H1
gaacatatagaaaaaccaagtaatactagccaaaatatgtctcccaaatacatgtcccttttcctcctagtaatactagggatggcctttctggccactacttcccttgctgatcgtcgttttctttcggtggaagatggtcatgatccaccatcaccaccacccaccaaaaaaacactggcctccaaccaaacaaaatgaaccttcaaacgtagaaaacgaggagaacactgaggtggaggatggtcatgatcatcaccat

SEQ ID NO: 9993 - DNA, 102 bp, Glycine max
  Clone ID: 701103146H1
atcattcacaaagcttcattcttcatagttcagagttcagatccattcttgtcctatgtgctggttcgtcttgccagaggtctctttaaaattgtctatcga

SEQ ID NO: 9994 - DNA, 98 bp, Glycine max
  Clone ID: 701103147H1
acacaacagaaatgaacctcgtgtgcttctcgattcagacccaatggcggaacatcacgcctccgatactatatagcgcggatttatccagatcaagc

SEQ ID NO: 9995 - DNA, 93 bp, Glycine max
  Clone ID: 701103150H1
gttcaatttccctaggggcttaatatctcccctcacttgtgcctagccttatgccatagtattatcattcactctcatctttctctcttctct

SEQ ID NO: 9996 - DNA, 258 bp, Glycine max
  Clone ID: 701103152H1
ggaaaacctgacttgggcctggtccaggctagatggtcctttgtgaacaaggatgagaatctactcacgaggctccagaacatcaacttgtgctttcactttgaggtggaacaacaagttaatggctacttcctaaatttctttggattcaatggaacagctggtgtttggaggataaaggctttggaggaatcaggagggtggttggagaggaccacggttgaggacatggacatagcagttcgagctcacttgaat

SEQ ID NO: 9997 - DNA, 108 bp, Glycine max
  Clone ID: 701103155H1
ctttcaatctcatttctctgtctctgcttcctcttcttcgatctcaccctgaattccctggacaatcatcatggctgacacacgaggaacatcatgtcgaatatgcag

SEQ ID NO: 9998 - DNA, 241 bp, Glycine max
  Clone ID: 701103156H1
gtttgtgcacatggcaagcttggacttctacttgcaccagaaccaagatggggcttcgcttttggattggaacaagaggttcaggattgctgctggagcagctagagggcttcaatacctgcatgaagtggtggcaccaaacatagtacatggatgtgttacgtcctctaatattctaattgatgttaacttttgtgctaggatttgtgattatgggcttaactttttggcacctgtggaa

SEQ ID NO: 9999 - DNA, 192 bp, Glycine max
  Clone ID: 701103158H1
agataaaatggggtctctaatggcctctcttactctcactcttgtattggcaatagtttctctaagcttgtactctcaagcctcagctgacaagtacgactattcatctccaccaccaccagtttaacagtacaagtccccaccaccaccatacaagtattcatctcatccaccacctccaacgaagcccta

SEQ ID NO: 10000 - DNA, 264 bp, Glycine max
  Clone ID: 701103159H1
cttagattcaaacgtccccagaatcaacaatcccgtgaccttctgcacattccttctcagatcgattggagacagagcggcgcagttacacccgtcaaagaccaagcaagctgtggtgcatgttgggcgttctcagctactggtgctattgaaggcataaataagattgtcacagggtctcttgtaagcctttctgaacaagagctgatagattgtgatacatcctacaacagtggttgtggaggtggactcatggattttgca

SEQ ID NO: 10001 - DNA, 261 bp, Glycine max
  Clone ID: 701103160H1
atttttattccttctttgtttcttcactttcttccatacacataaccatgtcttctcagactgttgtcctcaaagttggtatgtcatgtcaagggtgtgctggagcagtgaacagggttttgggaaaaatggaaggtgttgagtcatttgacattgatctgaaggagcagaaggtgacagtgaaaggaaatgtggagccagatgaagttctgcaagccgtttccaaatctgggaagaagactgcattctgggtggatgaag

SEQ ID NO: 10002 - DNA, 163 bp, Glycine max
  Clone ID: 701103161H1
tgtagcgcatacagcttgccagggctgtgtatcaagactctgatatatatcttcttgatgatgtttttagtgctgttgatgcacacactggcaatgaaatattcaaggaatgcgtgaagggggctctgaaaggcacgaccgttattcttgttacacaccaagt

SEQ ID NO: 10003 - DNA, 75 bp, Glycine max
  Clone ID: 701103162H1
catgagatcagccaggcgctgagcctcctcggcctggaagcagccgtggcggagtggacgtcatgacgaaactct

SEQ ID NO: 10004 - DNA, 131 bp, Glycine max
  Clone ID: 701103163H1
ccaccattgaaattgattctctatacgagggaattgatttctactccactgttactcgtgccagatttgaggagctcaacatggatctcttcaggaaatgtatggagccggtggagaatgtttgagggatg

SEQ ID NO: 10005 - DNA, 259 bp, Glycine max
  Clone ID: 701103164H1
ccagacaccagctgcaaatcatccttatcagcattctatgcagccagggtctggacaggctgcacatgccccagctgaatctggaacatcagcatcaggatcgcagcagcattaaacttgccatatactgatgtttctagcatgtttaagtttttccttaaactaactatgctgtcagggaagatattttcactcaagttgtcaatttactatctctactagctggatatgccttcccttgtggcatgaacgggttatt

SEQ ID NO: 10006 - DNA, 251 bp, Glycine max
  Clone ID: 701103165H1
gagaatgcaggatccaacgttgttccaacccatgaaaccccactttccggaacaggagcagcttaaatgaccgaggtgtgactccaccaacaccaagttctggtaatacaacaactacaacctctcgcagccacgccatttttgcaagaactgcagaaggtattggaccaaaggtggtgccctgagaaacatccctgttcgtggtggaagcagacagatcacaaagcgatcatcttcatccaacaacaaca

SEQ ID NO: 10007 - DNA, 115 bp, Glycine max
  Clone ID: 701103166H1
gttgacctactattctcccctcatcggagctcaaatctccgatcccttcatccatatcgcttcaccggaactttctcttcatccatcgcaagatctagatgaatctcaaccgcgc

SEQ ID NO: 10008 - DNA, 224 bp, Glycine max
  Clone ID: 701103169H1
gtgatccttgggtcaaaatattctacgtctgcagatctttggtcttttgcttgcatttgttttgagcttgcaactggagatctgttatttgaatctcacagtggtgagcagctttgctagggatgaggaccacttagcattaatggtggaagttcttggaatgatgccaactaagatagcacttggtggacgttcattccgtgctttctttaatgacatatggt

SEQ ID NO: 10009 - DNA, 260 bp, Glycine max
  Clone ID: 701103170H1
attctttccctttgacaactgcaatctaaggtagaaataacaaacacaacatgggttctttgggcacaatcaacaagccacatgctgtgtgcataccgtacccagcacaaggccacataaacccaatgctaaaactagcaaaactccttcacttcaaaggctttcacataacctttgtaaacactgagtataaccacaaacgccttctcaaagcaagaggccctgattcccttaatggcctctcttcatttcgctttgag

SEQ ID NO: 10010 - DNA, 255 bp, Glycine max
  Clone ID: 701103171H1
ataagaacacgtaccttaatttcgcaaaatcaaccaaagacagagaaaaaatccaaagagtaaaaggaacagaagagaaagcttgaagctatggggaacaccatgggaaggagtaaaaagaccaaggtgatgaaggtggatggagaaacgttcaagctgaagactccagcgagagcaaacgacgtcgtaaaggactaccccggtcacgttttgctggactccgaagcggtgaaacatttcgggcttcgggccaaa

SEQ ID NO: 10011 - DNA, 195 bp, Glycine max
  Clone ID: 701103172H1
gtcttgccgtggcttggacgctacgtcttgttatgatagcagtgcagagactcacaatcctttgttcttatacaagaacagtgttgatgtccacactctcaaacaaatttgtcaacgcacagaatcgaagtacacaaattgcagtggaggacgtttataaccacagaattgtgacttcatttgcgagaatcacga

SEQ ID NO: 10012 - DNA, 259 bp, Glycine max
  Clone ID: 701103173H1
cctgaatgctacgtcagcaattaggtgctgaaaatcttcgatcattctccccaaccatggcatttgtaggatgattcaggattggtgtgtcgcaaatagttcttatgggattgatagaatccccagaactcgtattcctatctcgggatacgaggtttccgacatgtgtaccaggatcttgttggcttgctatcgtggagatgacaagaggtgtcaggagttggtcgggaagattaaggtttggagtagagagagtgag

SEQ ID NO: 10013 - DNA, 261 bp, Glycine max
  Clone ID: 701103176H1
atctcactaaactgggtagcacttggatctccaagaaagccaaggcagagatttcccacataaccgacgacctatcatctctctcaaatactgtcgaagagaaggcaaagcttttcatcaacaagctcaaaggtaaaacccagaaagccttgccagatctccttcgagagtacaacattcctccgggtctgttcccccgcaacataacatgctacgaatttgatgcatcaaagggaaagttgatcgtgtacttatcctcac

SEQ ID NO: 10014 - DNA, 154 bp, Glycine max
  Clone ID: 701103178H1
tgaattcaaaaacttaagttcattccttgtgttttgctttcttgctcaaaaccaaacatgtcgaacacatgcggcaactgcggatgcgctgacaagactagctcgaccaagggaaacagctatggtgttattgtagagactgagaagagttaca

SEQ ID NO: 10015 - DNA, 132 bp, Glycine max
  Clone ID: 701103179H1
cttcatttcttactctcactgaaaaaaaatagcttgttcacaccatcctgttttttcaactcatatatacaggtatatataacctggcttctagcttctctcgaagcctagcacttgcaagcttttacattg

SEQ ID NO: 10016 - DNA, 205 bp, Glycine max
  Clone ID: 701103180H1
agctgcggttgctccatcacctaatcacttccccacttcccctgtaaatcacgtttagttcgcacaaggttttaaaaaatggctgatgctgaggacattcaaactcttgttgttgataatggaactggaatggtcaaggcgagttttcaacgtgatgacgctcctagggccgtgttcccagtattattgggcgacaacgcaatac

SEQ ID NO: 10017 - DNA, 251 bp, Glycine max
  Clone ID: 701103181H1
ctctagccgctcgagccgtttcaggcgtcgttgatctttttctttcgaagagatcctcgcatacacatctcacacttctcccacaagcagtcagatttgcattcgagttagcgcttcatatatacgcgagaatctagtagaccagtatatgtatctctactgataatcctatgcatggcttctaccgcaactcccgttatgcgatactgctcgcttttcgatcatctccacgaagagatgaaaatggagtg

SEQ ID NO: 10018 - DNA, 256 bp, Glycine max
  Clone ID: 701103182H1
tgtacatggaagcaagaccattggaggaaggtcttgctgaggccattgatgatggcaagattggaccaagggatgaccccaaggttcgttccaagatcttgtctgaagagctcggttgggacaaggatcttgccaagaaaatctggtgctttggccctgagacccttggacccaacatggtggttgatatgtgcaagggagtccagtatttgaatgaaatcaaggattctgtggttgctggattccagtgggcatc

SEQ ID NO: 10019 - DNA, 256 bp, Glycine max
  Clone ID: 701103183H1
aatcgagccgaatcggctcgagttttgtttgtacccttcgattcttcatcttcatagttgaagatttataccaagtatgtataacagtatataaagccgtgtttgttgggtgttttggaggatatgcttgtcttgctgtgttcagtggattgtgttaaaggggtattgaagatttttgttgaagttgaaaaatctgagagttttttggttgaagttctgctcccatcggtgctcaattgcaaaaatctgcagatga

SEQ ID NO: 10020 - DNA, 253 bp, Glycine max
  Clone ID: 701103184H1
gattgagacagattatacagaagattatgtagcaatttcggggtaccctctaagtgctgcttattgtattacaaggattactggcgcccttgagagaaagtggaagattttgtgatttaacaccaccttcagttcatgcctgagacgatttagtaattcgagttccatagtcaatttatgtaatatcagggataggggcctagcagtgatttagaaaatacaatatatgttgatttttttgaggcattgatgt

SEQ ID NO: 10021 - DNA, 259 bp, Glycine max
  Clone ID: 701103185H1
cgccaaataaacactctcactataaactccaaagtcccaacgctaaaccaaaccaaaactaaaacaatgttgtctgtctgagtttacattgagagtgcccaagttcgaattcgaaagcaaaaacatgtttttggcgagacccattttccgaggaccctcactttgggcgttgcactcttcctatgagtattcctctgcctctgcagctgatatacaagctgagagaaccatcaaagaagggcccagagacgattggagc

SEQ ID NO: 10022 - DNA, 115 bp, Glycine max
  Clone ID: 701103186H1
ctccgaaacccaatgcccggggcaatgcgcgtggccattccaacacctcatttatgggccacagagctcatccttggttgcatccaacaacgatgtgggccttgacgggatggtc

SEQ ID NO: 10023 - DNA, 259 bp, Glycine max
  Clone ID: 701103187H1
cgggaatatttggggcgaggtcctcctcctggctctggacgctgctttaattgtggccttgatggtcattgggcacgggattgcaaagctggggattggaagaataagtgttaccgctgtggggagagaggacatatagaaaggaactgcaagaacagccccaaaaaattgagcacaaggcgaggacggagttattcacggtcaccagtcaggtcacattcacctcgtcgtggcagaagccgtgatcgcagttacagcc

SEQ ID NO: 10024 - DNA, 261 bp, Glycine max
  Clone ID: 701103189H1
cttttcttctcttcttcttcttcttctacccttcaatattaatattccgtgcaaaaaccaccaacaacaacatcaccaccaacaagaagaacaagattggcgttatgggtctcttcctttctaggaatttggcttgcaaattcatatacccttttcttttctccaagaaggtttccaaggatttgtttcccaagcagttggagaacatgatgtctctgatctctcctcgtactggcaggcatttgcagcgctatgacaatg

SEQ ID NO: 10025 - DNA, 255 bp, Glycine max
  Clone ID: 701103191H1
gcagttagagacagagagagagagaaacaaaaccctaattggtgagtggcgaaaatggcgcagcaggcggcggcagcagcagcaacaggagcagcagtaatcgagcaagtgcagtgcttcgggcggaagaagacagcggtggcagtgacctactgcaagcgtggtcgaggcctcatcaagatcaatggctgcccgatcgagctggtggagccggagatcctccgtttcaaggccttcgagccaatcctcctcctc

SEQ ID NO: 10026 - DNA, 256 bp, Glycine max
  Clone ID: 701103192H1
agcaagggtgttgtagtatagttagagatatcactactacaccaccctgcatagtttgttcagctataatactcattgagcttctttacctacttttcaaacctacattgcacacaaaatggcagcatcttggtcatgttatctacttgcattgcttctttttatgtcaactattgtatcagagagtagagtggcaaggacggacttgggcctggaccttggtgggttgggggttggacttggactgggtttgggc

SEQ ID NO: 10027 - DNA, 191 bp, Glycine max
  Clone ID: 701103193H1
gaaaaaagagaaagtgaaaattagaaactcttgtacttggttttatgccaaattagggactcttttggttgtcaattagatcacaaagatatggaggttgccatggaactggaagatgatctattttttgctgatttgagcaaggaaattgctctactaattatggatgaagatgaagatccacttgcttc

SEQ ID NO: 10028 - DNA, 224 bp, Glycine max
  Clone ID: 701103194H1
gaggaaccgtgttctctaatcttgtaattttctgtgtcgcttcgtggttcattcttctcgttcttgtgatctgttctattttggagtacttacaacactcctttgcaagtttaattaattaaagaggctaatcaattttcaattggactgcagcagatggctgaggagggttgcagggttactctaaatgtttatcacttgagccaaggactagcacggcagtt

SEQ ID NO: 10029 - DNA, 78 bp, Glycine max
  Clone ID: 701103195H1
atctatctgaagctgaaaacgccgacgcccgacggtgatgatgaagatggggtcctcaccttcacgttgctccttctt

SEQ ID NO: 10030 - DNA, 199 bp, Glycine max
  Clone ID: 701103196H1
ctggcccacactagcatgcccaagtgggaatggggttcaattctggacccacgaatgggagaaacacggcacttgctctcagtcagtccttaaacaacatgactattttgaaacagctctcgatctcaagcagagagccaacctcctccaagctcttacaaatgctggaatacaaccagatggagggttttacagccta

SEQ ID NO: 10031 - DNA, 270 bp, Glycine max
  Clone ID: 701103201H1
ggcagcgagcgctcccactccacgcgaagagttcgtgtacatggcgaagctggcggagcaggccgagcgctacgaggcgatggtggagttcatggagaaggtctccgcctccgccgagagcgaggagctgaccgtggaggagcgcaacctcctctccgtcgcctacaagaacgtaatcggcgctcgcttcgcctcctggcgcatcatctcctccattgagcagaaggaggagagccgcggcaacgaggaccacgtcgccgtcatccgtga

SEQ ID NO: 10032 - DNA, 75 bp, Glycine max
  Clone ID: 701103202H1
ggattttggctctctctatttctctgtcgtctctttcatttcccctctcttgttggttccaattactctctctct

SEQ ID NO: 10033 - DNA, 267 bp, Glycine max
  Clone ID: 701103203H1
tttcttctttgttttcaattaggtttttttgttgctctccttcaaactccatctttccaaatcctctctttgcgattgtgttttgatctgcttcctactgcgatagtttctctactgttacatggccatggcggtttccgcaattggttttgaaggtttcgagaaaaggttggaaatatcctttttccagccgggactttttgctgaccctgaaggaaggggtctaagggctcttacaaaatcccagttgggtgagattctaacacc

SEQ ID NO: 10034 - DNA, 268 bp, Glycine max
  Clone ID: 701103204H1
cagtgataagccttgtgtcactggctaatgctggcttctcagagattagagggaagcatttgaactattcacagttttggaatgctaatccctctgcagaaaagcaggtcaagttgtctagcaaagctggcatgcttttgctgtacactcctgcttttcttgctggccttgcatccttctggatctttcctcatcaaggcctcagatccaccctccttcagtctgcagttaccctgcatttcttcaagagggtctttgaggttgtgtt

SEQ ID NO: 10035 - DNA, 272 bp, Glycine max
  Clone ID: 701103205H1
gcagctagctactagcatcttcttccatcaccacattcatcttaattaatattctctagtggtgcttcccaatcaatatcctttaattttgtctcaattcctttctttctcattcaccaatccatacttcattttgttaatttcttaatccaacaccaccaagatgccaactgacacatcatcagtttccggcggcgaaatcgtgtgtgtgaccggtgccggcggtttcatagcctcttggcttgtcaaacatctcttagagaaaggctaca

SEQ ID NO: 10036 - DNA, 270 bp, Glycine max
  Clone ID: 701103206H1
cgatcatacacttagttgcttccaattaagatggttctgctagagaagctctgggatgatgttgtggctggccctcaacctgagcgtggccttggcaagctcagaaaactcaccaccctcaaaactattgatgaaggagaaagtagcaagctgcagaagacgttgtcgatgccgtcgacaccaacaaccccgatgactccgacgactccaacgacaccgggatcggcccgtaaagctgacaacgtttggaggagcgtcttccatcctggg

SEQ ID NO: 10037 - DNA, 272 bp, Glycine max
  Clone ID: 701103207H1
agagaatgtggtggcggcggcgcccgagaccatgagaactacagcaccttccgatttcattttcacccaaaagcttcaccctttcaacatcacctccaccaaaacctccctccaacgaaccctaccctattttctccaactcaatcgcatggccgaggctgcacgaaccgcgcataaacccgcgccgcacccgatccaacccaaacccgacgataaaaccccgaatccggcgaaggagattccgccgccgccggagaagccggagcccggcg

SEQ ID NO: 10038 - DNA, 270 bp, Glycine max
  Clone ID: 701103208H1
cgttgtttcaattattctattcgcacaccccctgaaagagaatctctcctttctataaacccataatttagggcgcgctttttcccggcctcccttcgccaccgtatctccatccatctccgccaccgtcgccacctctctctctctctcacagttcgtatttatacatcttctctggtcttagcaatgagcttctcaacatgcgccgagatatcgcgttgtttcgccgcagcaacggcagcagcttcagcgaaacctaattccgggaag

SEQ ID NO: 10039 - DNA, 136 bp, Glycine max
  Clone ID: 701103209H1
gttatgttctcaaggagcccatcggagttgttgcattaattactccatggaactatcctctattgatggctacatggaaagttgctcctgctctagctgctggttgtacagcaatattgaagccatctgaattggc

SEQ ID NO: 10040 - DNA, 90 bp, Glycine max
  Clone ID: 701103210H1
ggcagaccacccaccctggagcaggtcttcaacagagagacagagaaggaagaacacacacacacacactcaccggttcaactagcattt

SEQ ID NO: 10041 - DNA, 208 bp, Glycine max
  Clone ID: 701103211H1
gggaagaggcgagagaaacgaagaagaagagtgtttctcacatcacatggcctccttgcccttggggcaccaccaccaccaccacaaaccggcggcggcggctatacatccgacgcaaccgccgcagtctcagccgcaacccgaagttcctcgccggagctccgatgtggccaccgctaacgatatgtcagctactgtcattgagggg

SEQ ID NO: 10042 - DNA, 155 bp, Glycine max
  Clone ID: 701103212H1
cttttgttgttctgtgtttgtgtttgtcttttctctcacctgaaactgtcttgctgcggtggtacctgtggttgcggaagctcctgcaagtgcggcaacggctgcggaggctgcaagatgtaaccagacttgagctacactgactcaaccaccac

SEQ ID NO: 10043 - DNA, 153 bp, Glycine max
  Clone ID: 701103213H1
ggaagggacacatttgacatttcacgaccgcgttcttttctacggagcctcgaccaagaagaatcgcagagagaagagggtcagagtgagaaagagagagagagagagagaaactgagagaaattcgcaaaccctaatttcggaaagatcggc

SEQ ID NO: 10044 - DNA, 140 bp, Glycine max
  Clone ID: 701103215H1
gttatttttgttttgcttaggttatatctggatgagaaatgccagtcaaatacactttcttcccccacacatttttgtattcggtgacactcacgtagattttactaaatatctgagtattatatgaatttcaattaaat

SEQ ID NO: 10045 - DNA, 169 bp, Glycine max
  Clone ID: 701103216H1
gtcattcacaacacaaacacattcaacaacatggtagcaattctcaagagacagggagaaaacgaatccgaagaaaccatcataggcttggcaaaaagtctcatgcaactctcgcgtgtccaacaacaaagcaataagcctcttctcaaaaccttttctccaacggagt

SEQ ID NO: 10046 - DNA, 274 bp, Glycine max
  Clone ID: 701103217H1
caaacaacaatggacctccgtgaatcgataagcaaccaaaccgacgtggccctgagcatctcaaagctcctgttgtcgaaagaagctcgggacaagaacctcgtgtattcgccgctgtcgttgcacgttgttctgagcatcatcgccgctggctccaagggccccacactcgatcagcttctctcctaccctccgatccaaatccaccgatcatctcaactccttcgcctctcagctcttcgccgtcgtgctcttcgacgcctctcccgccggc

SEQ ID NO: 10047 - DNA, 265 bp, Glycine max
  Clone ID: 701103221H1
gtgacatcagtgcctccttctggtctccctggtgttggtctcctacgctgcccggtcggaatcagcgctgggcggctcgagccccatcacggacgtaaacgacagccacgtggcggagatcgccaactacgcgctgagcgagtacgacaagcgttctggggccaagctcacccttgtcaaggtcgtcaagggcgagactcaggtcgtttccggcaccaactaccgtctcgtcctcacagccacggatggatccgcgacggccagt

SEQ ID NO: 10048 - DNA, 192 bp, Glycine max
  Clone ID: 701103222H1
ctcagagcgacattctggttacccatagtctcatatagtgtcatacagcacaaaaattcagcaacacaaaacaatgggttctcttatggcaggatggtattctacccacatggatcatcaatcagccacacttacaaggcaccgcccactcactaaggctgaacttggtgcttactggacatcaacgcagac

SEQ ID NO: 10049 - DNA, 179 bp, Glycine max
  Clone ID: 701103223H1
ctagcccttatcacaactctatctaacaaattacataggacaggcccacacacacaacaagcttctttgtctctcgtgccgcttctacaccactattcccttcaccccaatcacactttccggtagttgttgctattagcgtagaagatgagtacgctggctccaccaagggctgaact

SEQ ID NO: 10050 - DNA, 267 bp, Glycine max
  Clone ID: 701103224H1
gtacatatagaaaaaccaagtaatactagccaaaatatgtctcccaaatacatgtcccttttcctcctagtaatactagggatggcttttctggccactacttcccttgctgatcgtcgttttctttcggtggaagatggtcatgatcaccatcaccaccacccaccaaaaaaacactggcctccaaccacacaaaatgaaccctcaaacgtagaaaacaaggagaacactgaggtggaggatggtcatgatcatcaccatcactac

SEQ ID NO: 10051 - DNA, 261 bp, Glycine max
  Clone ID: 701103226H1
ttcacttgttacttaccaaaaccacttccaaaaagcctaagattaccacatagtcacattcacattgaagttaaacttgcattgaaaatggagggaagagatgaggatgtaagagtaggagccaataggtatggagagaggcaaccaataggaacagctgcacagacacaagatgccaaagactacagagaggcaccaccagctccattgtttgagcctagagagttaacatcatggtctttctacagagcaggcatagca

SEQ ID NO: 10052 - DNA, 174 bp, Glycine max
  Clone ID: 701103227H1
gtgacatttaaaggtgcttggtcaatttccacttagatctataacatggtttagttggacatacttaatttgaagatatattttatttttattttcataaataattattaaaattttgcatttgttattcaaatattttctttcttaaaggaacaaattgtatattgcagaaac

SEQ ID NO: 10053 - DNA, 146 bp, Glycine max
  unsure at all n locations
  Clone ID: 701103228H1
gtgagctgttcgtccaagtcgctgcagttatgcttgctctcaggaaaaggctnatactactacaacttcagctcactctcctacttctcatgctacacgttggagggtcctttctggatatctggttttgcagtgctcattttcct

SEQ ID NO: 10054 - DNA, 268 bp, Glycine max
  Clone ID: 701103230H1
ctttattttttctcattctcattactctctctttgcagagaagagcgaaatgtcgctgagttccagctccaggggaagaataacgacggagcttcaagtccccaagaaatggacagagagagaaacaagtcccgcagagacccagggtttgggccgaccccaagcccaagcccaaaacgcccagaaaagtttccgtcgtttactacctctcccgaaacggccaactcgagcaccctcacttcatggaggttcctctctcttcgcctca

SEQ ID NO: 10055 - DNA, 247 bp, Glycine max
  Clone ID: 701103231H1
gttatggaaggacaactacttgtatatggagcaagtaggtgcaacggcgggagccaagcacatcactattttgatgtggccagtgaataagcctctgctttgggaatatgtactggacgagatgtaccatgctgccttaaatttgagcctaagaatcgcttttgagcaggccaaacgctgacgagcttttaaaggctcctacagaccagcttagggcgccacggccactgcagaagcaatacaaacg

SEQ ID NO: 10056 - DNA, 142 bp, Glycine max
  Clone ID: 701103232H1
atctgagcaacagcttttaattttctacttgcttgaattttattggaagccatggattgttcatcatggattaacacttccttggatctcaacattaatccccgcagagttcatgaagaagttcccaaggaggtagaaagcg

SEQ ID NO: 10057 - DNA, 192 bp, Glycine max
  Clone ID: 701103234H1
gggtcaacagctgtgactgcaatacttattgatggtcagaagcttatagtagcaaatgttggtgactcacgagctgttatttgtgagaatcgaaaggcaagacaactatctgtggatcatgaaccaagcaaggccaaaacctggattgcgaagcgtcgccggcttgtatcaaaaattccaggagatgtccct

SEQ ID NO: 10058 - DNA, 267 bp, Glycine max
  Clone ID: 701103235H1
ctgcagcccatttacggcccacagaacccgcccttggtcgcgcccaccaacgacgtgggcatcgaaggaatggtcatcaacgtggctaacctattggatgggaccgttaccaaccctttcgggaatggctacttccaaggacacaaagaggctccgctcgaagccgcttccgcttgcaacggtgtgtacggaaagggcgactacactggctacgctggggacctcttggtggacaccactaccggcgatactcacaatgctaccggc

SEQ ID NO: 10059 - DNA, 263 bp, Glycine max
  Clone ID: 701103236H1
gttttatttatggaaggctaggtatatagagaaaaaggacgtaattctattacgaaattattgtttatttaataaatttcctaatgtgaaaacaaatattatattttaaacatttttgaaaagtgaaacatctcagtatcaaaaaataacagaaatcaatagagattccgaaagtagtggtgagcgaaattggattaaggaataacaataactactaaactaaacagtgtggaataattgacccagcaggtgaaagtcctgtt

SEQ ID NO: 10060 - DNA, 224 bp, Glycine max
  Clone ID: 701103237H1
ttctaatcagaaaatccaacatgctttgctggagctagaaactgctctgatggcacctgatgacgatcaagttaacacaccgaatacattggccgagagcagcaggccaatggcatcaggccagagatccaggtcctggagcaatgagaaccatgtgtcacaatatactcaaactcagccatcatatgcaactgccaatatgcagtcaagtgaagttgtgcacg

SEQ ID NO: 10061 - DNA, 265 bp, Glycine max
  Clone ID: 701103238H1
agcctcctttccatttttcttctcctctctctggtaaccttcctctcctttttaatccaaatcatcgttcttattttttcaaggatatttttgctgtgattgcgtgaatttcgatcaacctttgaagcatcctttgctgcaacttttaggtctcaattttaaggtcaactttctgtgccgggtcgttcaacttgcatctttatcatttgatctattgtttgagttgacgagtgaacttgtgtgacatcatagtttctgtgagaga

SEQ ID NO: 10062 - DNA, 267 bp, Glycine max
  Clone ID: 701103239H1
ttcctttcttttcattacatacgcaaaacccattttactccctctttcacaaaagaacaatatctctattttccaaactacacacatcatttagaatccatgtctttctctaccaaattacctttagtcctattattttcatcccttttcatccatgcatcttttgctgatatggtgtgtgatgtcctgccaaaggaagtgtgtgctttctcagtagcttcatcagggcacaggtgtttgttggagactgagacggccgccgacggt

SEQ ID NO: 10063 - DNA, 264 bp, Glycine max
  Clone ID: 701103240H1
cttacatgttcgggagcatatcgccggtgataaagagcagcatgggtttcaaccagaagcaggtggcgttcttgagcgtggctaaggatttgggtgacaacgttggtcttcttgctggaaaaatcagccaggcttcccctgtttgggggcttatacttgtcggggtcgtgcagaatgttgttggctatggccttgtttggctcgtcgtcactcacccgctcgccgctttgcctttgtggttgctcatgcattgtaatccttgtg

SEQ ID NO: 10064 - DNA, 178 bp, Glycine max
  Clone ID: 701103241H1
gtggagatgccgacgctgataaatgggccacgcacaaattggccactatattggcattgatgcgccttcgtctgggatagaacaaatgcgagaaacttgggagactcacaggaaatcctacactgccgagttctttgagcttgaccctttgcacggagactcatagccacgcatttgg

SEQ ID NO: 10065 - DNA, 176 bp, Glycine max
  Clone ID: 701103242H1
ctcgagccgcaatatattccattctctctgtgtatttccctacctctcccttcaagatgcagatcttcgtcaagaccctcaccggcaagaccatcacccttgaggtggaaagctctgacaccatcgacaacgtcaaggcaacgatccaggacaaggaaggcatccccccggcacca

SEQ ID NO: 10066 - DNA, 144 bp, Glycine max
  Clone ID: 701103243H1
gtgctctcttccctcctccacttcatccaaatctttctcattttctctcccaaatcacactctcaattacaataacacacactcaacttgagaattttccccaaaaatcccaagagctcgcgccatggtttccccggaaaacag

SEQ ID NO: 10067 - DNA, 206 bp, Glycine max
  Clone ID: 701103245H1
agagaggaaggaaaaatggagttgttcttctacgcggtgttcggcggtttgggagcggttgttgcaatgacggagatgagcaacagcaacaaggaccgaatcaacacctcttccgcattcaattccttcaagaacaactacctcatcgtctattccctcatgatggctggagattggctacaaggtccatatgtctactaccttta

SEQ ID NO: 10068 - DNA, 144 bp, Glycine max
  Clone ID: 701103246H1
cgttcactgtactttatccctttctgtgagggaattatggtaattgatatcgaggttttgactcatggattctgatcgccccagaaaaccttccaaaaatttagttcactctcgcttcttacttttcggcttctattgctgggc

SEQ ID NO: 10069 - DNA, 98 bp, Glycine max
  Clone ID: 701103247H1
ctcgagccggttggtgttagtcttggtgtagtgtagctagggagggatatatatctgagtaagatggaatcagagcttgaattgcccccaggcttcag

SEQ ID NO: 10070 - DNA, 133 bp, Glycine max
  Clone ID: 701103248H1
ctcgagccgtggcgatcggatccagctacagcatagagatcaaggaaggaaggaaggacgatgttgggtgttataaggcacaagagtattcgccatgccttctccgcaatcagacacttgtcttcggcagcta

SEQ ID NO: 10071 - DNA, 96 bp, Glycine max
  Clone ID: 701103249H1
gaatcgcttgggccttcggtggcatgatcttcgccctcgtttactgcaccgctggcatctcagggggacacataaaccaggcggtgacatttgggc

SEQ ID NO: 10072 - DNA, 248 bp, Glycine max
  Clone ID: 701103250H1
gtcgagccgctcgcttttctgcaaaatcatctaaatccgcttctgatcctgaatcatcagtttttcccttgaaagatgggaggtggcaaggacaaacacaatgaagaagagcaaggagttttctcacatctggctcatggagtagctcaagctgctcatggttaccctccaggggcataccctccacctcctggggcataccctccttaccaagggctaccacctgctcatggctaccctccacaagg

SEQ ID NO: 10073 - DNA, 174 bp, Glycine max
  Clone ID: 701103251H1
atgagttggtgaaggtagtggtgcaagtgttgaacctcttgcttctgagactgctggctccactgctgtggttgccattttgactcaaacacacataatagttgcaaattgtggagattcaagacgtgtcttgtgtcgcggaaaaccagcactgccattgtctgatgaccacac

SEQ ID NO: 10074 - DNA, 99 bp, Glycine max
  Clone ID: 701103252H1
gtctttttctctctctacactctattcaacccttcacattttctctcttctctatcttaaattacttttccatggaggaaagcaagaaacgagtccggg

SEQ ID NO: 10075 - DNA, 149 bp, Glycine max
  Clone ID: 701103253H1
ctagcttgttaagctttttggcatggttttgttcatatatatttctcctcatatcgtgattctaccattttcaatattaagctactaccgcttgcaaacatcctgcggactaaagtgccgaaatgtatggtggcaccgtggcactactt

SEQ ID NO: 10076 - DNA, 215 bp, Glycine max
  Clone ID: 701103254H1
cgaaatttcttagacaaaaaacaaggatcagaaccgttgaatcaagttgaggaagatggcactagtctctggaggacgatcaacactgaaccctaacgcccctctttacattcctgccgcgtttcgccaagtggaggatttctctccggaatggtggcagctcgtgacgacactgacatggtaccctgcctactggctacgccagcagcacgatg

SEQ ID NO: 10077 - DNA, 258 bp, Glycine max
  Clone ID: 701103256H1
ctgatggcagaattgcatggcaaactaacactgccaacaagggtgacgtggccttcaggcttctctcaaatggtaacatggtccttcttgatgcacaaggcgggttcgtttggcagagttttgatcaccccacagatacccttttggttggtcaatatcttagagcaaaagggccatccaagttggttagtacgctctcagagaaggaaaatgttgatgggccttatagtttggtcttggagctaacaggttagcttg

SEQ ID NO: 10078 - DNA, 156 bp, Glycine max
  Clone ID: 701103258H1
ctagctattagctatagctagaagtacatccactccctctctgtcattgtgcttttctagttacttccaaaataacaccagaagtagagacaatgcgttgccaagcatggcccgaccccatcgttcgagtccaatccttagctgaaagtggcctaa

SEQ ID NO: 10079 - DNA, 235 bp, Glycine max
  Clone ID: 701103260H1
ttggtcccaggtgggcagctggaggattcgagagttctcaagggagtcatgatacacaaagatgtggttgcacctggcaaaatgaggagaaggattgttaacccacacatcattcttcttgattctccccttgagtataaaaagggtgaaaaccacacaaatgccgaactggtccaaaagcaactcgggactctcttcttgaagatggaagaagaatatattgaggagctatgca

SEQ ID NO: 10080 - DNA, 203 bp, Glycine max
  Clone ID: 701103261H1
gaggtgatgttccctggtggtcatggtcttatggtccgtgcttacttgcctgttataaataccctatccaagggacttgctattctcttggggcacagggtcacaaaagtagttaggcgatataatggagtaaaggtaacagtggaaagtgggaaaacgttttttgctgatgctgctgttattgctgtcccacttggggtgct

SEQ ID NO: 10081 - DNA, 262 bp, Glycine max
  Clone ID: 701103262H1
gttctttgtctcgcaatcttcactattttcaccgagcatttgcattccacattgaatatggctgaggctacacaatctaatgctgagttattggagtggcctaagaaagataagcgccgcttcctgcatgttgtgtatcgtgttggtgatcttgatcgcaccattaagttttatactgaatgttttgggatgaagcttttgaggaaaagagatattccagaagagaaatatgccaatgcttttcttggatttggccctgaac

SEQ ID NO: 10082 - DNA, 214 bp, Glycine max
  Clone ID: 701103263H1
gcgtattgctgatgccagtattgatgaatgatgattaaagataagtgtaattgtatgatgaaaattgctcctagttgggttggcatgatgtataaaataagctagaagttgttgtaaatcacataagtatattatggccttaatcgccggtaccccacccatcctaccgctcatatatggatagtccatagtcacatattgtattgtattaaaa

SEQ ID NO: 10083 - DNA, 268 bp, Glycine max
  Clone ID: 701103264H1
tttttcacaaactgtggaaagattcgattttactgctgggatactgctggacaggagaaatttggtggcctcagagatggatactatatccatggacaatgtgctattatcatgtttgatgttactgcccggctaacatacaaaaatgttcccacctggcaccgtgatctttgcagggtctgtgcgaacatcccaattgttcctttgcggtaacaggttgatgtcacagaccaggccagttaaggcaaagcaggttacattccacagg

SEQ ID NO: 10084 - DNA, 261 bp, Glycine max
  Clone ID: 701103266H1
cttctctcaacgtttgctcaccccaactcttcttccagtctccatcaccatctccatcaaatttaactatggctactgaagaggttttggttgatgaaatcacttacccttccaagatcactactaccaagcccctatctttgcttggccatggaatcaccgacatggagatccactttatccatgtgaaattctattcaatcgggatttatttggagcctgaagtagttggccacttggagcagttcaaaggaatatctg

SEQ ID NO: 10085 - DNA, 264 bp, Glycine max
  Clone ID: 701103267H1
ctctgtgcttagttaacgttaacagtgacttacgctggcggcttctgcagatgttccccacgatgttgtgtccctcctctcttctcctcaaagggaccttcttcttcgaaacaacggcgatcaggttaaaattgacagcttgaagggtaagaaacttgcgtttgtacttttcggcatcctcgtgtggtccatgtcaaacatttacgacaactttcgtggatgtctacaatgaggttgcaaaaaccgtgacttccagatcgtttt

SEQ ID NO: 10086 - DNA, 248 bp, Glycine max
  Clone ID: 701103270H1
gctcgagcggctcgagcggctcgagaaactaaccactctgtttctcttgctctacttttaccctgtttccagtggaacaaatcttcatccaaattaggttttgttttggagaaatgtatgcagagactggtcttttcttcccatatttgcacaacgtctctcacggccttcatcagcttgaggagtactgcaaaacccagaagtccaatgcttcaatggatgacttgttcagtcttctgccatgtcag

SEQ ID NO: 10087 - DNA, 129 bp, Glycine max
  Clone ID: 701103271H1
cgtcgagccgcatcggctcgagcggctcgagatatttctctccatctatctcttcacactctgagtttcatccatttgcattgactgacaacgactaactctgaaaaccgcaaccaactcacacacact

SEQ ID NO: 10088 - DNA, 248 bp, Glycine max
  Clone ID: 701103272H1
ctgaaccttggctgattacaacatccaaaaagaatctaccctccacttggtgctccatctgcgcggtggtatgcaaatctttgtgaagacccttactgggaagaccattactttcgaggtagagagctcagacacaattgacaatgtgaaggcacagatccaagacaaggagggtattcctccagaccagcaaaggttgatttttgctggacagcagcttgaagatggacgtccactggcatactaca

SEQ ID NO: 10089 - DNA, 127 bp, Glycine max
  Clone ID: 701103273H1
caagaaactcctaattgtcaattgttgtaaagaaaagaactgaaaacactgacactgttattctctgaattttctcaccatctacaactgaagttttaaccaatatggaaactgaaaagtctaatgt

SEQ ID NO: 10090 - DNA, 241 bp, Glycine max
  Clone ID: 701103274H1
ttccttttgaaggttagaagtgctacaatacaaacaatggcagctactcaggaagatgtgaagcttttgggtattgtgggaagcccatttgtgtgcagggtccagattgcccttaagttgaagggagttgaatacaaatttttggaagaaaatttgggcaacaagagctgattgcttctcaaatacaaccctgttcacaagcaggttccagtgtttgttcacaatgagcagcccatagcag

SEQ ID NO: 10091 - DNA, 118 bp, Glycine max
  Clone ID: 701103276H1
gtcatcaccaattccatttcgatttttggctcagccaaccatcacaaatagacactcgatgacgcgaaacaagcaaagtacgaacccagatacgggaacaaggttgttatctctgtta

SEQ ID NO: 10092 - DNA, 141 bp, Glycine max
  Clone ID: 701103277H1
tttaatatttgagtgtgatcgatggcatacccaaacccttatccggctcagccctatccctccgcctccgcgccgctgccggcggttccctccgccgtgatcggccccaagttctgcgcgccgtacccggtggatctggcg

SEQ ID NO: 10093 - DNA, 205 bp, Glycine max
  Clone ID: 701103278H1
ttcatcggttggccaggttcgatgccggacgatcgcgttctggagaaaagcgcgttgttccagagagcgagcagacggaacttaaaggacgtttggctcgctcgacattcaggccatccgcttatggcatgggttctagctgcgtacacgcacgcgaatctgccgtggacccagcacgcgtttcatgagaagcttgcagagattc

SEQ ID NO: 10094 - DNA, 96 bp, Glycine max
  Clone ID: 701103279H1
ctgctcgagaagtctttctgcttcaaaatagacttatttaaggatatttgttgaacaacttgtgtcctgttgagttattgctgtttgaatttcatg

SEQ ID NO: 10095 - DNA, 227 bp, Glycine max
  Clone ID: 701103280H1
cttagatcaccatgactatctcattccttatttgaggaaaataaatgtacataccacaaagacttatgctacaagaaccatatttttcttgaaagatgatggaactttgacaccattggccattggagttaagtaagccacatcctcagggtgaagaatatggtcctgttagcgaagtctacgtgcctgccagcgaaggagctggaagcttatatttggttactggc

SEQ ID NO: 10096 - DNA, 264 bp, Glycine max
  Clone ID: 701103281H1
ctaaaatctgcacttgtctgctccaatcagtttctatttttattttgtttcttcgagaatgtgattgtttggggggaaaacggaaaagaagagaagcacgatggagtgggtgaagatgaaggagtacgcgagagagttcatggttggagtggcggagatgacggtggagttcggaaaaggttgcagagacatagtcaaacagagtctggtcaacgacgactcctacatcgtcaaaaacttcggaagagactcctacattggaaa

SEQ ID NO: 10097 - DNA, 266 bp, Glycine max
  Clone ID: 701103282H1
atctactctctattttcctagcttagattccttctccaatggctcttgccgtttccactacttcttcctcttcagctgcagcagcagcagcagcgtcgagctctttcttctcgcgccttggatcttcatcggacgctaaagctccgcaaattggttcctttcggtttccggagaggcctcaagtttcgtctggtgttgttaatttaactcaaagacgctcctcggtgaggccactcaatgccgaaccgcaacggaatgattctgtt

SEQ ID NO: 10098 - DNA, 201 bp, Glycine max
  Clone ID: 701103283H1
gtagggagaaaaaggaataggagatggcacagttagttatggaatggatgatggtgatgaccatttacatgcgctcttggactggaaccattattggtccctataatactgtacatgaaggcagaatttatcaattgacgctgttttgtgatccagactaccctgaaaagcccccgagcgtccggcttcattcacggatca

SEQ ID NO: 10099 - DNA, 224 bp, Glycine max
  Clone ID: 701103285H1
ctcaaacacatcccttaaaatgaggaagatcgttgttgaactgtgtgacattgttgctactcgcggagctcggcttgctgctgctggtattttgggcatccttaagaaaataggaagagacacagttaaggttggggagaagcaaaagtcagtgatagcgttggatggggggttgtttgaacactacaccaaatttagagaatgcttggagagtgcactgaagg

SEQ ID NO: 10100 - DNA, 258 bp, Glycine max
  Clone ID: 701103286H1
gtcttttctacccttcccggatcccaatccctaatctttctaccactctcactccaaaaatctctaattttttcatctgggaagatcggttgacgaatcgaggatccgatcgcttgcgaggaactagggtttcaatcgatcgcatcacacacaaacaatcatgtttagccggatgttcggtaaacctaaacaggaaaccaatgctgttgccactttggacaagctaaacgagacacttgaaatgctggagcacaaagg

SEQ ID NO: 10101 - DNA, 266 bp, Glycine max
  Clone ID: 701103287H1
cttgttcttcttgttgttttttttcttccctctcttctctttgtttgtcttctccttcggttgaatcaatgggtgcagaggttaagatctggaatcccgttgaagtcgctgagcaagctcgccatgactacgcttcgcagattcatccctcacatctcaccattgatccctccctcgagcttcctcaaatgacacctctcgtcctaaagttgtgcaaggatatgttcaaggcgtggtcgaatttggatgattcttgctttgttgtt

SEQ ID NO: 10102 - DNA, 151 bp, Glycine max
  Clone ID: 701103288H1
cttctttgttcctaaacacggggcactggtttcgaaccctcgttgtggttaggtctacttcacctttcgcattttggaatccatgggtcagggaactccgggcgggatgaaccggcacggtgactggtagccggacgggggtgcccagtta

SEQ ID NO: 10103 - DNA, 159 bp, Glycine max
  Clone ID: 701103289H1
gcatcatctccaaaatcccaaactcatatcataacgggatcggaggctaatctattacgcgctgttctctcgtcttctacaagattttctgttcgatctcaaccaaggttgttccttcaacctccgccatgagtttcatctttggaaagcgaaaaaccc

SEQ ID NO: 10104 - DNA, 260 bp, Glycine max
  Clone ID: 701103290H1
cttctctgcaaatgcttcattccaagatggttaggactctgtaggctgataaagacaacactcataccgttggaaagaaggatgctgctggccatgttgcttaatttagttcttgcttcctttgtcttcttgagttttatcagagacgggagtgcagggatcactagctctttcattcggtcagagtggccggcagttgacatcccccttgatcatgaagcatttgcagttccaaggggttataatgccccccaaccaag

SEQ ID NO: 10105 - DNA, 262 bp, Glycine max
  Clone ID: 701103291H1
ttttctttcttttgtgtttcttgctttcttcttcttcgctttcgtcccttttcggagtatccctcccaaccatggacgttgatccttgccaatacgaacaaattgctataaatgaaaaagatgtcaacaacatcattctgtcataccttatacataattgctacaaagagtcatcagagtcattcatttcttgcactgggatgaagcagcctgcagatcatttggagaacatggaaaaaagaaaaagtagtaaggcctcctt

SEQ ID NO: 10106 - DNA, 171 bp, Glycine max
  Clone ID: 701103292H1
atgaaatttcaccgtaccagagaacaaggaaggatagaagaaagtgaaagaaaatggcgttgtacatggacgaagaagagatttggaagtgtccgaagcatccaatccaattgaattctccagagagaagaagaaacttaatcgatcatcacttcacttcactactacatc

SEQ ID NO: 10107 - DNA, 262 bp, Glycine max
  Clone ID: 701103293H1
ctggcaaagacgagttcagagacagagatattctctatcaccacaccgttgagcaaagtggctggcaaggtgaacttcaactctttgatgctggcgatgaggagcatgctttccagctcttcaagcctgagactcatcttgctaaagccatgatcaaacgcttggcttcttttctggtttgatggatggcttgtcatgagagattccaaacaagttaaatcgtgcgtgccttcacctgtcttgtctactactccagttttag

SEQ ID NO: 10108 - DNA, 264 bp, Glycine max
  Clone ID: 701103294H1
ctgcttttctcttccctctatcgtttgttctttccttcattcactctcgccgccgcgcgtgctaaaaaccgtctattccagaatgggcagcgagggcgtgccgtcgacggtggcggaggtcatgtcggtggcggccgtcgagctcactgacgcctccagctggtggcacgacatcgacgactctccgctgtggcaggatcgtatgtcctacactctcgccgtactctacggtatcgtggccaccgtagctttggttcaactggc

SEQ ID NO: 10109 - DNA, 154 bp, Glycine max
  Clone ID: 701103295H1
ctctctccaaaacccaactttctctctcaagatccatcaaatctcgatcctcccctctccctgcaagatccggtggtggttccgattgctcacatagggtttggtctcgggtcggtcaaggctggcgggtatttgggtgaagtaaatggcggat

SEQ ID NO: 10110 - DNA, 263 bp, Glycine max
  Clone ID: 701103296H1
gtagaaatgggtgtctctgcagattagacattagagtgtgaactccaaactctgaaaccctcaactcaaatccaatcctttggtgggtttcgaattggagtccaaccaaattctaaacacatggactcagctctgtcgcggttgcatctccacaatctccctcctctttcctccgccgctcaccgccctctcttgcagcctctcgccgtcgccgcttctttctaccgctcttctcctcctctcccacgcctccgtctctcgcc

SEQ ID NO: 10111 - DNA, 267 bp, Glycine max
  Clone ID: 701103302H1
attctgtccattctagattgtcatatatagagaagcagaattagaaagaagggtagctaggagactttctgaattgaagccttttttttcattgagtgattgagagcatggagaacatgaagatgaacaaagatgaaaggtttgcacaaaagggtgtcccaatacatagccaggttatgaagatcaggcaagagtcagagaaaattgttgattggtccccgggcaagccagagataagacccgttctccgtgaaataagccggcaga

SEQ ID NO: 10112 - DNA, 265 bp, Glycine max
  Clone ID: 701103303H1
cgttatttcaactccagctattaaagggacaatcctacctggcattactcgcaaaagtataattgatgttgctcgaagccaagggttccaggttgaggagcgattagtgtcagtggatgaattgctagatgctgacgaggtcttctgcacgggaacagctgtggttgtatcacctgttggcagtattacttatcttgacaagagggtagcatatggggatggtattggcgtggttgcacagcaactttatactgtccttaccaga

SEQ ID NO: 10113 - DNA, 264 bp, Glycine max
  Clone ID: 701103304H1
ggaagatatagaataaacagcattctggacacacaaggggcattatgaattccttgttataccctttggcttgaccaatgccagcctcacctttttatgaatgatgtggtaaaaccatttttaggtgtgtgcttgtcttgtctaaatgaaggctcatgagtgctttatgtctaacaaatgtaatatatggattcagtggaactttaacagaaccagttgagaaaacaggtgatcaaattaaagaaatggaactgaaggttcatc

SEQ ID NO: 10114 - DNA, 266 bp, Glycine max
  Clone ID: 701103305H1
gctaacttagcacagtttacttggttgcccggtttggcccaacccgtttacacttacctccatcaaatagaaaccctagacgcagccgctcttatacaactactctattctaccacatctgagtctctgtccgaagccacttgagagaaaatggcggtgcctctgctctcaaagaagatcgtgaagaagagggtaaagaagttcaagaggcctcagagtgacaggaaaatttccgtcaagactaactggcgcagaccaaagggtat

SEQ ID NO: 10115 - DNA, 265 bp, Glycine max
  Clone ID: 701103306H1
ggaaaatatctatatatccatgtaggtactccacttgaaatcgagttcgcagagaaaccttattgtgctgaatcctccaaatgggtggcgtttgtggacaatgaaatccaaaaggcatgtgtgggtattggtggtcctgaaggtcatcctggtcaacaaacatttagtggcacatttagcattcagaaatataaatttggatacaaacttgtgttctgtatcactggctcaggcacttgtttagatattggaaggtttgatgcca

SEQ ID NO: 10116 - DNA, 264 bp, Glycine max
  Clone ID: 701103307H1
cggtgcagaagcaaatggcggcgagaagcaattgaaatttctgatctacggtcgcagcggttggattggtggtctactgggtaagctctgcgaagagcgcgggatccaacgtcgtcggcactctcaccctcgccgacgtctgccatcataaaggcctcatcctcatcaactacgccaccggctgcatcttcgagtacgattcttcccacactctcggatccggcatcgccatccaggaacacgacactcccaatttcaccggat

SEQ ID NO: 10117 - DNA, 264 bp, Glycine max
  Clone ID: 701103308H1
gcttcattatctcctcttggtgaagcatgctcaagaaaggacttgactgccatacatgaagttctggaaagtcttggctataaagatgatgaaggagtggcgaatgagttatcatttcagatgtggactgatcaaatgcaggacacattaaattgcaagaaaaagggagatgttgcatttcggcagaaagattttagactggcaattgagtgctactcgcagttcatagatactggaacaatggtttctccaacagtctatgca

SEQ ID NO: 10118 - DNA, 197 bp, Glycine max
  Clone ID: 701103309H1
cttgcacttctacaagaatcccgtgaacatagtggagggtaagaagcagtacctgtttgacgagaaggggagaaggtacgtggatgcgtttggagggattgctacggtgtgctgcgggcactgtcaccctgatgtggtcgaagccatagtcaaccaaaccaaaaagttgcagcactccacagttctctaccttaaca

SEQ ID NO: 10119 - DNA, 264 bp, Glycine max
  Clone ID: 701103310H1
atcgttttagttaatttcaaaatgaagaaacgatggagtgcatgaatcttagaataatgattagcgattctgtgggattgttaggggaaaaaggtgaagaatcgaatcggtacgaacgtgattcttagctggagcgcgatgggggaagattattgtgaagatttgtctcgatcgaccagaaaagcccgtttactttttataaaaaaaaaaaaaaaaaacttttaaaagggggctgctgtttcatattcacctcgtgtagaatta

SEQ ID NO: 10120 - DNA, 261 bp, Glycine max
  Clone ID: 701103311H1
gactgagatctcgtctccctcttacttttcttatttatttccatgtatcttcaatagcctttttttttttatagacaaagttgggattttgatttcattttcttgcacccaattggattttgatctgaacccagttaatcattaagtcactgtattgtgagtaagctgtttgtcgttgtttcaaatttgaagtactggagctgctacattaggtgggcttttgagtggtgaatttgacgttgaatgtccggtgaaacgaga

SEQ ID NO: 10121 - DNA, 264 bp, Glycine max
  Clone ID: 701103312H1
tctcgagccgattcggctcgagtatttatccatttagaaagacatacctggttacccatagactcatagtgtcatactgcaacacaaaacaatgggttcccttatggcaggatgggactctacccacatagatcctcaatcagccacacttaaaaggaaccgctcactcaccaaggatgaaattgatgcttactggaaatcaaagaagaagatagaggaagaacaccttagagctatttccaacttgtcagagactattcaggc

SEQ ID NO: 10122 - DNA, 263 bp, Glycine max
  Clone ID: 701103313H1
caatccccacttcgccctctctctctcactctcaccatggcgaacctctcatactttctcttccttctctttctcttcgcaacccacgcacgttccgacctccccggtacgtgggagcttctcgtcccggacgccggcatcgcttccatgcacacggcggtgacacgcttcaacacggtggtcctcctcgaccgaaccaacataggcccatcccgaaaactcctcccgaaaggccactgccgctccgacaaacacgacgccgt

SEQ ID NO: 10123 - DNA, 265 bp, Glycine max
  Clone ID: 701103314H1
cggctcgagaaaaaataaattattttgaaaccctaggttggagatggtggtgggaggaacagcagatttcttctacaaagaagctcaacggttagggtatgtggctcgctccgccttcaagctccttcagatacagaaccagcacaagattatcagccctggctcctccattctcgacctcggctgcgcccccggcgggtggctccaggtggcttgccagagcttgggtcccttccgcggcggcggctccgtcctcggcgtcgaa

SEQ ID NO: 10124 - DNA, 264 bp, Glycine max
  Clone ID: 701103315H1
gcaaaggagtgatttggagtttggagcgactgaactaatcattaatttgcactcgctgtttcagcttcatcacccttcttttgcatcatttatatctcttgagaaatggcacaagaaacctttctattcacatctgaatctgtaaacgagggtcaccccgacatgctgttcgaccagatctctgatgcagtacttgatgcgtgccttgaacaggaccctgacagcaaggttgcctgtgagacatgcaccaagaccaacatggtc

SEQ ID NO: 10125 - DNA, 265 bp, Glycine max
  Clone ID: 701103316H1
gcctcgagccgaatcggctcgagattgcacatatatcagtactcattctcttccctctcctctcactacttgtcatcaaaggctaaaactcacatccactaccgtgcactgttattcataaaaaagattatatttacacaacaatatataatggccagatttctacacatgcttataatgctctctagccttgctctaattatctcagttttgccattggcctccgcatctttgaaggtggacttctataaaactacgtgcccat

SEQ ID NO: 10126 - DNA, 261 bp, Glycine max
  Clone ID: 701103318H1
agtatgagagccacgctggttttactcttcctgggctctatagggttgtccatggcattgatgtttttgatcccaagttcaatattgtctctcctggagctgatatgtcaatatatttcccctactctgaaaagcagaacagacttacagccctgcatggttcaattgaacagctattatttgctcctgagcagactgatgaatacattggtttattgaaagacaagtcaaagcccataattttctccatggcaaggctag

SEQ ID NO: 10127 - DNA, 263 bp, Glycine max
  Clone ID: 701103320H1
gttaccatttgctcccagcactgagcttaaccgagcttcacaaagatgaatcgggaaaaattgatgaagatggccggttcggttagaactgggggaaagggcaccgtgagaagaaagaagaaggctgtccacaagacaacaaccacagatgacaaaaggcttcagagcaccctgaagagaataggggtgaatgccatcccggctattgaggaggtcaatatctttaaggatgacgtagttatccagtttctaaatcccagagt

SEQ ID NO: 10128 - DNA, 88 bp, Glycine max
  Clone ID: 701103321H1
cagcagtcggagaagatgccatatctcaatcatttcagcatcgccctcgccggaaataaataataaccatattccattcactttttcg

SEQ ID NO: 10129 - DNA, 264 bp, Glycine max
  Clone ID: 701103322H1
gcagctttggaaaacccaaccagccaacagatgttggtttgattgtgtggacttaggagtgaatagtttgatatatgcgcatggaaggaagagaaggcttcagttctggggttacagtgataggggcagaagctccatcagcctatcatatggcaccaaggagtgaagctccaagtcaggttcctcctcctgttcctgaagcaacagctggagctattggtgtctcacctgtgagtgtgggattggatggaacagcagctaaga

SEQ ID NO: 10130 - DNA, 261 bp, Glycine max
  Clone ID: 701103323H1
gctgtctctgtcttcctttgtggctgacgatgttgccgctgctgttcctgctgctcaagatctgggggagcagtggtcttattaatggatgtgcttcaattcaaatagtctcgcactagtcatcattccctttgtttctgttgcttgcttggttgttcttcttcttcttgttgatcgtcgtggtcgttgaggtcttcaattttttttttattattattccgttttcgctgtttttagttttgtcctggatgcaatgcagga

SEQ ID NO: 10131 - DNA, 135 bp, Glycine max
  Clone ID: 701103324H1
attctctctgtgtatttccctacctctcccttcaagatgcagatcttcgtcaagaccctcaccggcaagaccatcacccttgaggtggaaagctctgacaccatcgaccacgtcaaggccaagatccaggacaag

SEQ ID NO: 10132 - DNA, 252 bp, Glycine max
  Clone ID: 701103326H1
tcgaggacctgtggaagcgcgcgaagaccttcgccgaagaggccgcgaagaaatcccaatccctgaccccttcctcctcccggatcgccgatctcgtctccgaaaccgccaagaaatcgaaggagctcgccgccgaagcctccaagaaggccgacatcctcaaatccgccgcgcttcgccaggcagaccagatcaagtccttctccgacacaatcgcaattcctccccaattcgccgccattgcctccgccg

SEQ ID NO: 10133 - DNA, 260 bp, Glycine max
  Clone ID: 701103327H1
gtctcggacctcgccgtcgcgtttgacctggcctcaaagctctccgccgaacgcgccatgaacgcgtcgccgtttatttggaaactaaaacgactcctcaacataggatccgagaagaaactgagagaaacaattaacgtagcaaacgacgtcgcaaaagagatgataaagcagagaagagaaatggggttcaagacgcggaacgaccttctctcgcggttcatgggatcaatagacgacgacgtttatttaagagacat

SEQ ID NO: 10134 - DNA, 258 bp, Glycine max
  Clone ID: 701103328H1
cttcatcacgcttctgcttctttcatttcgctcttagtttccttttcatactcaccgcctcaccaatacatagttttaacttccttttattgagaaaaagaaaagtctagagtacaattcaatggtatggatgacaccatggagaagagcaccaccatcttagccattgctgcttcccagaggtactccttgaagatctccttcaatttccttttcgggtttatttcaataaattaaggattaatatttgtgaaaaag

SEQ ID NO: 10135 - DNA, 256 bp, Glycine max
  Clone ID: 701103329H1
caaaacctcaagtaccttctccttcacattccctcagcactttctgtattcaaaacttttggcattgtttccaatatcctaacttgagactatatatatagcagcatatatatatatataatggatagggtgacacagatggcatcagagaggccagtggtgatattcagcagaagttcatgctgcatgtgccacaccatcaaaaccctcttcagtgacttcggagtgcatccaaatgttcatgaacttgatgaga

SEQ ID NO: 10136 - DNA, 262 bp, Glycine max
  Clone ID: 701103330H1
cggagacgcaactcatgacgccgccggaaaccctatgaacctttggagcttcgacgacctgccttccatggcaggagtcttctgaacaccctttatctccccttttatgtaaataaagctacaagaattgtgatcgtgatgttggtgatggagtccacagcaagaaacctgcttaaagcttatgtggagtttattttatcttgtagctaatgcagtagtataggactatatataggtttttattatagggtatccttttgtg

SEQ ID NO: 10137 - DNA, 260 bp, Glycine max
  Clone ID: 701103331H1
gttgtaactcgttcttcttcttttgttgttctgtgtttgtgtttgttttttctctcacctgaaaatgtcttgctgcggtggtaactgtggttgcggaagctcctgcaagtgcggcaacggctgcggaggctgcaagatgtacccagacttgagctacactgagtcaaccaccaccgagaccttggtcatgggagtggcacctgttaaggctcaatttgagggtgctgaaatgggtgtgcccgctgagaacgatggctgca

SEQ ID NO: 10138 - DNA, 128 bp, Glycine max
  Clone ID: 701103334H1
cagctatcatgtttgacctatggggtgtctcatgcctggaatatttggaatctattccgtggaccgaggatgaacaggaggaagtcatgtctcagctagaacatctgcagattgatgactctgcaact

SEQ ID NO: 10139 - DNA, 130 bp, Glycine max
  Clone ID: 701103335H1
atcattctcatattattgtcgccacttcgacctcaatcaccctcgcgccctcgctcttcccttcctggtggcgacaatgtcgactcctgctaggaagaggctgatgagagacttcaagaggctgccacaa

SEQ ID NO: 10140 - DNA, 263 bp, Glycine max
  Clone ID: 701103336H1
cagaaacatccacaacaacaacacccaattaccgtcttcttcactgtcagacaaagaagcgtcgccgccggtgaaactaacacacaggtgcaccgtttgcaacaaggcctttggttcttatcaagcactcggtggacacaaggccagccaccgcaaggcctcgtcggaatccaaccccaccgcctccgtctctgccctagccaacgacagcgtttctgcttccaccgtcggcggcggaaggatgcacgagtgttccatctgta

SEQ ID NO: 10141 - DNA, 258 bp, Glycine max
  Clone ID: 701103337H1
gctttgctttgcgcaccgtttcgtttcgtttcgtttcactatttttttcagatatttagacgaaaacaagaatccgcattctgattctgaagattcatgtctaatctcatttctttcttcccttggttggagctcgttttttaggagctcagcagttgatggactgttaccccaagagcagtgacaagaaaacattaaagaggtggttttttattgataaaagagttgggtgaagtggaaatctgataaatattattt

SEQ ID NO: 10142 - DNA, 128 bp, Glycine max
  Clone ID: 701103338H1
ccctagtctccatacatcaacttgggaggttaaagagacggcaacgttgtgctgtccgccttgaccgagccacagcttcgtcttggccctcggttttgccctgtaaaactaatcgcagtcacaacaga

SEQ ID NO: 10143 - DNA, 262 bp, Glycine max
  Clone ID: 701103339H1
gatgaaaccaaaaggaagttcctagattggccaaagcgtttcaacattattaatggcattgctcgaggacttctatatcttcatcaagactctaggctgaggattattcacagagatctaaaaacaagcaatgttttactagatgcaaatttgcatcccaaaatatcagactttggcttggctcgatcatttataggagatcaagttgaggcaaacacaaatagggtggctggaacatatggttacatacctcccgagtatg

SEQ ID NO: 10144 - DNA, 249 bp, Glycine max
  Clone ID: 701103340H1
ctctctttcaccaatcaacacaaactaagttcttccttctgttgacaagcgatagccatggccacgaatccaatcgaagcggggaacggcgacgctgctcccgaccctaacgcgactaccaggtcctccgtgtagctgcaagactcggatgagctgaagcgagtcttcagccgattcgacgccaacggcgacggcaagatctccgtctcggagttggacaacgtcctccgctccctcggatccggcgta

SEQ ID NO: 10145 - DNA, 131 bp, Glycine max
  Clone ID: 701103341H1
cagcgcgagtggatctggacgggaaccccatgaaggcacttacgatctgcatgatcggcgctggcggcttcataggctcgcatctctgcgagaagctcatgtccgaaacccctcacaccgtcctcgccctc

SEQ ID NO: 10146 - DNA, 127 bp, Glycine max
  Clone ID: 701103342H1
cacaagttaacgtggaagaagagtctactagtgacttggaggaggaactgaagcgggtgactgcagaaaacaagaagttggccgaaatgctctcagtggtgtgtgagaactacaacactttgagaaa

SEQ ID NO: 10147 - DNA, 258 bp, Glycine max
  Clone ID: 701103343H1
caaattaatatccaacactctcaagctttccactttcaaactctgcccgctcaatttgctttatctttccgagatttatatacacttttattgaaactgttgggattcaagtctgaaacaaaatcttaagaagtttgcggcagctgatgccatcatcttttagtatggattcgcaacagctcttcagtttcgaattaccttacatgtcatctttacccaccgttccatcgcttcttggatccttgaaatatgacacag

SEQ ID NO: 10148 - DNA, 182 bp, Glycine max
  Clone ID: 701103344H1
atggatttctctaaatttggtggaatgggtgatgcaatggatgacattgatgagagtgatgatgaagagcaagaagtgtcaaagcctcttgaacaggatgctggcgaggcatcaacagagaaaaaagaggctgctccaagcacatgatgccgttgcagttcaaggcgctaccctagaagatg

SEQ ID NO: 10149 - DNA, 134 bp, Glycine max
  Clone ID: 701103346H1
ctcgagccggtttctcatggcggttccaacatcggaaagcgaatccgtagagaacagaacactcctttcacagttttactctcactatctcgtaaaccgaatcaagactctctatccctacttctccacaaatt

SEQ ID NO: 10150 - DNA, 254 bp, Glycine max
  Clone ID: 701103347H1
tgttaattttctgacttaccctcttcacatttgtgtgcaatgttagaggacattgaatcatctactactcggctttgtaaaatgggattcggtcgaaattcgacctcaagaagcggagattacttggacggaatgcttaacgactatgttcgaggaaggagcaacctgaaggctcagaagagcgccgccacaacaacgaagtttgtggcagtgctcacgtgccttcagtttttctttgcagtctatgcaacatt

SEQ ID NO: 10151 - DNA, 182 bp, Glycine max
  Clone ID: 701103349H1
cgattgctagaatggaatttcgatgctcagtcatctcttttaccattctcttctctcttgctcttgcaggagagagccatgtccatgcatcgctacctgaggaagattattgggaagctgtttggccaaacactcccattcccactgcactgcgagagcttctaaagcctctccctgcaggt

SEQ ID NO: 10152 - DNA, 253 bp, Glycine max
  Clone ID: 701103350H1
cgcaaacaaaacaccctttccttcttcttcttcttcttcttcgttccgatcagattcttcgaattctgaatcaaaattcatcgaagaagaaggagaaggagatgtatagcaatttcaaagagcaagcaatagagtacgtgaaacaagcggtagatgaagacaataagggagactacgcgaaagccgttcacctttacatgaacgcgttggagtatttcaaaacgcacctcaagtacgagacgaaccctaagat

SEQ ID NO: 10153 - DNA, 257 bp, Glycine max
  Clone ID: 701103352H1
cctattgatacggagagcagaaagatacttagttgttggtgctgtccggttcattcgaactattctctctcgccatgatgaacatctgataaattattttgttaggaataatgttctgaagccaattattgatgcatttgtctctaatggcaatcgctacaatctgctccattctgctgttctggaactttttgagtttattcagaaggagaatctgaaattattgctgaaatacatagtcggttctttttgggacc

SEQ ID NO: 10154 - DNA, 260 bp, Glycine max
  Clone ID: 701103353H1
cctcgagccgattcggctcgaggccttttcagggaaggaccctaccccggttgacagaagtgacccctatattgtaaggcagactgcaaagagtgtcgtggcaaatggccttgctagaaggtgcattgtgcaagtttcctatgccattggtgtccctgagcccttgtcagtgtttgtggacacttatggaactgggaagattcctgacaaggagattctgcaaattgtgaaggagaatttcgacttcagacctggaatga

SEQ ID NO: 10155 - DNA, 90 bp, Glycine max
  Clone ID: 701103354H1
ggttgtcgtgatccatcacaacactttgtcactgagattcagagaaatggcgtcagcaatgtgtcgcaggggcatcatcacccactactc

SEQ ID NO: 10156 - DNA, 258 bp, Glycine max
  Clone ID: 701103355H1
ctactcatcattgtctcaaaaaccttctctctcaacaaaacctacaacaacaacaaaaaaagagaaattttttagaacaatggaggcatcaaagatgaagtttttcttggttttggtgattgccatgttggcgatggtagcaactggggtttcagctgctgaggcacctgccccaggtccttcatacgatgccaccaccttctttgtacccactgctcttgcttctctctttgttcttgcatttggccttctcttcta

SEQ ID NO: 10157 - DNA, 75 bp, Glycine max
  Clone ID: 701103356H1
tgaacatggaagcaactgagatcatattccttttgttttttggtccaaagagaagatatatggaatagcattagc

SEQ ID NO: 10158 - DNA, 151 bp, Glycine max
  Clone ID: 701103357H1
cttgttcattcataccccttatcaaatctccacacatatatattacatccaccgatctctctgtcattctccctcgcgttctcattgtctctagacgaagcgttcgcaaaaacaagttcgttgatttcgttggtgagtatcaccttgatct

SEQ ID NO: 10159 - DNA, 256 bp, Glycine max
  Clone ID: 701103358H1
cggtcactgggttgctgaacctgaacctcaaccatgtccatggcgtcttcagtttcattttctgaggaaagtagttggggcaaaagggtatctgaaaaggttctttctttctacgcttctcttcccaaaaagggcaaacctcaaggccgtgaagtcaccgttttggccgctttccttctctcttctccttccaatgatttgaaggttgttgcaatgggaacggggacaaagtgcattggacgttctctcttgcgca

SEQ ID NO: 10160 - DNA, 257 bp, Glycine max
  Clone ID: 701103359H1
cctcgagccgattcggctcgaggaagatggagatgtatcagatctacagcaggagaatagcgctgggagcgttcgcgtttgcactgcttttcctatcggcctcagcagacgacgtcgttgtgctctctgaagataacttcgagaaggaagttggtcaggacagaggagctctcgttgagttctatgctccttggtgtggacactgcaaaaagcttgctccagaatatgaaaagcttggtagcagcttcaagaaagcc

SEQ ID NO: 10161 - DNA, 260 bp, Glycine max
  Clone ID: 701103360H1
cctcgagccgaatcggctcgagcaggtgtcaccaagagttccagcacgtagctatcttgtcaacactgtttcctacgagctgactgtcctttgcactagagggccaagaagaatgcattgtgtcatgaactctatacctgtctcagctattcaggaaggaggcaacgccccaactccaacatctttccctcaaatatttgatgaacctttttctccatcaccagcactgaaagaaaaagctcaagtcacagatttaaact

SEQ ID NO: 10162 - DNA, 259 bp, Glycine max
  Clone ID: 701103362H1
cagcaatccagctcccggacccgccaagccccacggccgcgcgtggcactccggacatcttcgaatccggcgtccacaccctcgtccgccgcgccgtcgtcatcggcaacggcttcccctcctccgagaatcacagcatcggtttgctccgcgcccttggcctctcccacaaccacctcctctaccgcgttacgaggccgagaggtggaatcaacgattggctccattggcttcccctctctgtccatcgaaaatttca

SEQ ID NO: 10163 - DNA, 260 bp, Glycine max
  Clone ID: 701103363H1
tcggctcgatacgaaggagatagtgaaagagcttcttgctctaattcgagtgtacaaggatggcagcgtggagcgtcttctaagctctgaaaacgtggcagcctcccctgaagatccccaaactggagtctcatccaaagacatagtcatcgcagacaacccctacgtctccgttcgcattttccttcccaaatcccaccacactaacaataaactccccatcttcctctacttccacggtggcgccttttgcgtcgaat

SEQ ID NO: 10164 - DNA, 196 bp, Glycine max
  Clone ID: 701103364H1
ctcgagccgttcagcgagcagtacttcttattcctctgaagataacgaaagtagtactgtcactggtcttgattcccctgtcactaaggtttgggatggaaaaagtaatagaaaccaggctgtttcttatgttcatcacccacttgaaaattttgacaatcacagtgcaaagaaaaggaataagagccattctcgg

SEQ ID NO: 10165 - DNA, 182 bp, Glycine max
  Clone ID: 701103365H1
tttggctccaaatgttgttgacagagtagacaaatgctccacattgaagtgtgtattcggttctcatactgaattaatgcaatggtttcacttcaaaagattctcaagtggatatattcttttaatgaaaatctatatgtgaaaatttctcccattgcaagaaggaaatggccgcatacttt

SEQ ID NO: 10166 - DNA, 236 bp, Glycine max
  Clone ID: 701103366H1
cgcctcagtagaccatggcctcattgggtgggttacaaaatctaagcggcatcaattttcttatcaaaaaagagggtccaaaagtcaatgcgaagttcgagctgaagccgccaccatatccactgaatggtttggagccggtgatgagccagcagacacttgagtttcatttggggacacaccacaagacatatgtggaaaatctgtaaaagcaaatcgttgggacagcgcttgat

SEQ ID NO: 10167 - DNA, 258 bp, Glycine max
  Clone ID: 701103367H1
caaacaaagccctagcatgaaatcatccttcgaagaaaaataattccaatcaatcctagaatccaatccctcccctttgaatttgatgcctcctcgcattcaattccacgctctggtggcatcatcatcatggatcgtggtaataacaacaataacggcgttgttgttgttgtcgtttgggtgcgaacggggacacgctctgaaggtgccgtttagagtaaacgacgtgctccccgtgctgccgcgcgagatctcgtg

SEQ ID NO: 10168 - DNA, 255 bp, Glycine max
  Clone ID: 701103369H1
ctttctagaaacatattatgcccaaaatgtaaagggaaaggttcaaaaagtggaactgctggtaggtgttttggatgcaaaggcactggtatgaaaattacaagaaggcagattggactaggcatgattcaacaaatgcaacatgtctgtcctgactgcagaggatctggtgaggtcattaacgagagagataaatgtcctctgtgcaaaggaaacaaggtttcccaggaaaagaaggtgctggaagtgcatgtt

SEQ ID NO: 10169 - DNA, 256 bp, Glycine max
  Clone ID: 701103370H1
ctcgagccgctttctttgtctcttattgagtttttggcttctcacttctttttttctttcacactctcaacgaagtgatttataacagtgtttaattgaaattccaaacatggattggcgtcgaggagacgctgtcggacgaggaagctttgctaccgttagtttagctattccaacgacgaattacaatcagtttccgtctctaaccgtggttaagtcggctgacgctcaaacctcgtgctggctcagaaacgag

SEQ ID NO: 10170 - DNA, 253 bp, Glycine max
  Clone ID: 701103372H1
attttgagggcaatgatgttgacctttaaagtttcgttatgaagtaatatgaaagtggtccttatacggttacaacagcatcaacaacatcattagcaacaaaagcaaaaacaccaccaccaccaactagaacaaaaagaagaacatgtcgttttacattggtcgcgaggcttccaagctgtggaagagattttatgcagagacaacaaccgagctcaacctccttgcggagaattggaagtaccttctcgct

SEQ ID NO: 10171 - DNA, 161 bp, Glycine max
  Clone ID: 701103373H1
taaaaccctcctcgttttctctctctacttgcagatcacgccgcaccaaccgttgtggttgtggattcggttgggcgtctacagtcgctatggcttcagcttcgtcttcgtcctccaagctatgcttcaattccgactgcaaagaggttgaagtccgaaag

SEQ ID NO: 10172 - DNA, 168 bp, Glycine max
  Clone ID: 701103374H1
caaactagggtttgtttgtgtggcagaaggaggaatgggaaggtatcgtagccggagcagaagctatagcccccggcggcgaacagaagcccaccggcaccgcgcggacggaagcgctatgtcgacgatcgctacggtgacagcaggtcttacagagaccgccgctca

SEQ ID NO: 10173 - DNA, 252 bp, Glycine max
  Clone ID: 701103375H1
cttatctccaattgcaacatactaagtgggttggctggtttagatctgagcaacagcttttaattttctacttgcttgaattttattggaagccatggattgttcatcatggattaacacttccttggatctcaacattaatccccgcagagttcatgaagaagttcccaaggaggtagaaagcgagcttttctctttgggaatgaccaagtttaacgtggaagaagagtctactagtgacttggaggagga

SEQ ID NO: 10174 - DNA, 257 bp, Glycine max
  Clone ID: 701103376H1
tcgaacactgctactactactactttctctctagatatgggttcccgcgctgtgcaactgtctttcatcttggggctcttggctagctcatgcttagcccaagcaccaggtgctgcaccgtcacaaccacccactacaaccccatcaccaccaccacccagatcagcacctgcaccagcacccaccacaccagcaaccccaccaccagcaaccctaccaccagcagcaactccatcaccagcagcaactccaccacc

SEQ ID NO: 10175 - DNA, 256 bp, Glycine max
  unsure at all n locations
  Clone ID: 701103377H1
caacctaccnncaccctttccttcttcctctaaacacctccacccccctccgcccgccgctcccctctccgtgcgccccttccctccgcgcgccgctcctcggagccttattgcagcaaatagggagacgaaatgggccttagaggaaataggaacaaatatgaaacacaactggctcaaagaaatttcaaaagcaatgatactcagaatcacatacaggaacaaaacaccatggaactttattcacgagcaaggg

SEQ ID NO: 10176 - DNA, 245 bp, Glycine max
  Clone ID: 701103378H1
tttttgcagtctagagatcctcgatttcatgcacttcctcttgcatctcaaagagttgcagcatttacagatacagttaatgaacttgtatatgatgtcctcatatctaaagtacggcaacgcctcagtgacgtgtcccgtttgccaatttggtcatcagtcgaggaacaaggagcctttcctctccctaccttcagtgcatatccacagtcatatgtcaccagtgttggtgaatatcttcttac

SEQ ID NO: 10177 - DNA, 256 bp, Glycine max
  Clone ID: 701103379H1
ctttccctttgacaactgcaatctaaggtagaaataacaaacacaacatgggttctttgggcacaatcaacaagccacatgctgtgtgcataccgtacccagcacaaggccacataaacccaatgctaaaactagcaaaactccttcacttcaaaggctttcacataacctttgtaaacactgagtataaccacaaacgccttctcaaagcaagaggccctgattcccttaatggcctctcttcatttcgctttga

SEQ ID NO: 10178 - DNA, 156 bp, Glycine max
  Clone ID: 701103380H1
ccttaagttacgtaacagttgtttcagttcctaatgcgcaaacgtatcaacactttggaaaaaagataaaggggtttaacattcctgtcctataatgcaatgccattatagaattacttgcctgcctgaattgaaaaggtggagattgttaagatt

SEQ ID NO: 10179 - DNA, 146 bp, Glycine max
  Clone ID: 701103382H1
ctcctccatttctgtgcctcttctctgtcgttacgaccctctctcctaaacggcgtaacggaaggagtcacgtgacgtgccgaagagaaaggaaaaggttgatggctttagagcaggatggtcagaataggcacacaaacggcgta

SEQ ID NO: 10180 - DNA, 125 bp, Glycine max
  Clone ID: 701103383H1
actcgagccgaatcggctcgaggagagatgaaggcatagaccttttgaaagacaaacaagctcatcagcgtctcactgagacagccgagaaagcaaagatggaggtctcaacattgactcaaact

SEQ ID NO: 10181 - DNA, 146 bp, Glycine max
  Clone ID: 701103384H1
caaggatcgatgtgggcagcttcttgcctggcgtcatgctgcgcggcctgctcatgcaacgactgtaggaccgtcgtatctggaatcagccgtcgttccgccaagatcgcctactgcggactcttcgacttctctctcgtcgtcgg

SEQ ID NO: 10182 - DNA, 254 bp, Glycine max
  Clone ID: 701103386H1
ctttaatgtgaaagggttggaacggtttttgattttaaccctgcaaagagccttcctttgcggtttttcttcttgagaagaagaaggctctttgttgttgttgattttgaagaaggaaagaaggaaggaagaaaatgatgaggctatggatttcttatctgcaatacgcggaactttttgtgagttcattggttcatatgcactatgggcttcacatatttagctccgctgtggctggggatctctcacaggct

SEQ ID NO: 10183 - DNA, 94 bp, Glycine max
  Clone ID: 701103388H1
cccattctttctcattcacacagcatcatgggcgtcaaaggttttgttgaaggaggcatcgcttccatcatcgcaggatgttccacacaacata

SEQ ID NO: 10184 - DNA, 148 bp, Glycine max
  Clone ID: 701103389H1
gaaaatcacacaaaagcacacacacacacacccttcttcgatcctgagtttgtatcattgacgatttttgtcacaaagggttgttgtctcttcagagagacacagatcttgaggtttgaggcaaaatccttcacacactttggtggtt

SEQ ID NO: 10185 - DNA, 216 bp, Glycine max
  Clone ID: 701103390H1
aactccgacaccaaaaaaccattccaacgaagaagagagttagttagttctgagtgagtggttcctctcaagaagcgtccagcgtagtaacgctgaggaccttcactctcaagttttcaaccgtttgttttctatataatatccctaaccgccgtggatgggacaatctgtttcctccgccgccgtcgcaagccgtcgtgagagggatccaggcca

SEQ ID NO: 10186 - DNA, 198 bp, Glycine max
  Clone ID: 701103392H1
gtttcgatgacaagacaactttgaggttgagttgcacaaagtactgtatcgcgtcaaagcgtagaggttgcgttcatgctcataaaatctgtattttaaagctgatgccatgagttgtatgtagttatgatgattcacattctttcattgctatttacagttttattttacagtaatataaaacattctttatggttc

SEQ ID NO: 10187 - DNA, 255 bp, Glycine max
  Clone ID: 701103394H1
gaactcacaaaggacagaagaaacgcgaatgccaggagaactccaattaccacccgggttcagattccaccccactgacgatgagcttgtggatcactacttgtgtagaaagtgtgctgcacaaaccattgctgttcccatcatcagagaaatcggtttgtacaagtttgatccatggcagcttccagagatggctctttacggtgagaaagagtggtactttttctctcctcgagaccgaaaatacccaaacgg

SEQ ID NO: 10188 - DNA, 133 bp, Glycine max
  Clone ID: 701103395H1
tgggttcaacaggtgagactcagattactccaacccatgtatctgatgaagaggcaaccttttcgccatgcaactagccagtgcctcagtactccctatggttctcaaatcaggtcttgagcttgatctgttg

SEQ ID NO: 10189 - DNA, 251 bp, Glycine max
  unsure at all n locations
  Clone ID: 701103396H1
cagtatcccccttaccctttaccctacgatccctattctgtcggagtaccctcttcctcgcctcctcctcagcagcgccttcccgtttccaagcctcncccgcctccgccctctcctcctcgctcctcaccttgggactttctcaatttcttcgataacagcgacgacaagtactattcccaaactccttactctgccaccgccaccgccacccccagccgcgattccagggaggtcagagaggaggaggg

SEQ ID NO: 10190 - DNA, 212 bp, Glycine max
  Clone ID: 701103401H1
atcaattgtaatcaacaccaaccgcaacattgattcttcacatgaggctgactcaaacgacggatctggattcgagttgaaaacaagtgcatgcgatgaagcgttgagtttgcttcataatcctcatttatccgaacaagggttgaagactctcttaagcttcagaaacggcgagtttattgagtctttaacaagagtcatgcaaaaggggt

SEQ ID NO: 10191 - DNA, 254 bp, Glycine max
  Clone ID: 701103402H1
tccattctctctgtgtatttccctacctctcccttcaaggttagtcgatttcttctgtttttcttcttcgttctttccatgaattgtgtatgttctttgatcaatacgatgttgatttgattgtgttttgtttggtttcatcgatcttcaattttcataatcagattcagcttttattatctttacaacaacgtccttaatttgatgattctttaatcgtagatttgctctaattagagctttttcatgtcaga

SEQ ID NO: 10192 - DNA, 255 bp, Glycine max
  Clone ID: 701103404H1
ggtgaacgcttcaaggaattcctgagggaggttgcaataatgaaaggcttacggcatccaaacattgttttacttatgggtgcagtcactaagcctcctaatttatcaattgtcacggaatatttgtcaaggggtagcttgtacaggctgttgcataaacctggcgctacagagatgttggatgagagacgtaggcttagtatggcttatgatgtggctaagggaatgaattatcttcataaacgcaatcctccc

SEQ ID NO: 10193 - DNA, 258 bp, Glycine max
  Clone ID: 701103405H1
cctcgagccgaatcggctcgagctttagtggagctatttggggatcaggagaataatcgtaaagctgttgcatgtttaaatactgatggctactcggattgcaacactttttgcttcattaagagaatttccttttgtccgctttcgtgctgccaagtccctagatgcaaccacaatgactaccttccatgatcttattcctacaaaacttgctgctggtgtctgggactgtcttatgaaatataaaaaaactatacc

SEQ ID NO: 10194 - DNA, 256 bp, Glycine max
  Clone ID: 701103406H1
ctctttttctctctctacactctattcaacccttcacattttctctcttctttatcttaaattacttttccatggaggaaagcaagaaacgagtccgggacgagtccagctactcacccgagtcccaaactcagctggtcgactctcccgagtctgaaagtcagcgggtcgactcacctgagtctaagattcgtcgagttgactcgtccgagtctcaactcgactcggtccttgactcggaggtgcgtctacaaga

SEQ ID NO: 10195 - DNA, 257 bp, Glycine max
  Clone ID: 701103407H1
cagacacagagcgagagagaatcgtaacagaaacggtcactggaagttgtctctaccaccctctcagccatggcaacaattccccctagccgatcatcatcacacgcgtttgttgccatggcaaccttcacgactctgttgttgtgcacggcggcggcgaaggagagcgtgtacgagatactccccaagtacgggctcccgagtggtctgttaccggataccgtcaccgactacaaactcgacgaggatggccaatt

SEQ ID NO: 10196 - DNA, 258 bp, Glycine max
  Clone ID: 701103408H1
ccgtaatttaattctagctaatttgctaaagtaccagcaaaatgtatcctacagtagatgaacatgatgaggtatatgcagctcatcatagacatccagggtatgttctaccagttgtggtgccaccaaattatggccctcctcaaattccatcctatgctcctccatacatcagcaacagtgttagtgtaaggggtcctgtgattaggacacagcgatggtcaactggtctgtgccgttgtactgatgatcctggaa

SEQ ID NO: 10197 - DNA, 261 bp, Glycine max
  Clone ID: 701103409H1
actttctgttgattaccctgtcgacaaagtttcctgctatgtatcagatgatggttcagctatgttgacctttgaagcactatctgaaacagctgagtttgcgaagaagtgggtgcccttttgcaaaaagcacaatattgaaccaagagccccagagttttattttgcccagaagattgattacttaaaggacaagattcagccctcgtttgtaaaagagcgacgggcaatgaagagagaatatgaagaattcaaagtacg

SEQ ID NO: 10198 - DNA, 262 bp, Glycine max
  Clone ID: 701103410H1
ctgaaacttcagaagcggcttgccgctagcgttctcaagtgtggtagaggcaaagtttggcttgaccctaatgaggtcaatgaaatctccatggctaattctcgacaaaacataaggaaattggttaaggatggtttcattatcaggaagccaactaagattcattcccgttcccgtgctcgcagaatgaaggaggccaagaggaagggacgtcactctggttatggtaagcgtaagggtacaagagaggctaggctcccca

SEQ ID NO: 10199 - DNA, 263 bp, Glycine max
  Clone ID: 701103411H1
ccttagtttctctcttcacatatcatcatacttagatagtcagatacatcacccaataattaaattaaatacatgctagcactttaacagtactcctttctctaatatctctctcatattttcctttctgcggatattcagctaattaaactaagtcactaagatgactgagggaaagctagttgaagctgcagaagctcataagacacttcaggatttcgatcctccaaagaagcgcaaaaggaacaagtatgcttttgctt

SEQ ID NO: 10200 - DNA, 263 bp, Glycine max
  Clone ID: 701103412H1
atcgcttcttcttttctccgccccggttctccttgttattgccgatgcacttgttccttctgctctgctctcctcgctttctcaatcttctttctccatggaaactctcgcttcccatttccacaactacgattttcgatactctctcattgatattccccttgtgtcaataatacgatccttcatcatcttctgtgtttatagtttgtgtgatggaccaaggctttcgcatggaccttatttggggatcacgaccatgtgct

SEQ ID NO: 10201 - DNA, 262 bp, Glycine max
  Clone ID: 701103413H1
cagctaatgagcagtctgttgcaactttcttcagtcaagttatggctaagattgggggaaacactgctggcccaggtgatgctgtcgtcaatgtttacattaatcatgacaagaagtttgcctttgtggagatgaggtctgttgaggaagctagcaatgcgatggctctggatgggattattttcgagggggcacctgttaaggtcaggagacctactgattataatccttccttagctgctaccctaggcccaagccaacc

SEQ ID NO: 10202 - DNA, 262 bp, Glycine max
  Clone ID: 701103414H1
caaaattccaaaaatttcccctcctatctccttttcacgtcacttaccacaactgggatgctccactttcttaaggattatttgttaactgagtcctaagtgtaattgagatggacggtgatatatttggagaattaggcaattcaactcaagtagatagcaggcttctacaggtatttcaaaagagcttattgcaagctcaagatattttgaatcagaatcggttgctgatcaatgagataaaccaaaaccatgagtccag

SEQ ID NO: 10203 - DNA, 265 bp, Glycine max
  Clone ID: 701103415H1
ctcaggtcaatatggcatactctccacttcaacagctggaatctacacgcgagtctcgctgccacagctgtctagctctctgagggcctacgcgacaagactcaccatggtcccagaatcttccctgttcacgtactgaccggtgaaattctggcacgcgcatagggtatcgaaggatctctcagctcctgggctcgttgcttccatggagcaggatgcgtagctcaaggtgtgatgtgaggcctggaccaggaccaccatggtg

SEQ ID NO: 10204 - DNA, 269 bp, Glycine max
  Clone ID: 701103416H1
tatcactcgatgatcatgcgtgattccagaacatgtgttgagcatttcgagagagttcgagtccggagtgctcagacatgagctgccctcgatgccgtcgccgacgacttgaacgtcaactcttcttccactcgccagcacgacgatgacgaggacaacttctctggctacggcggctactcctccttcaccggaggattctccgccgacggagatgtcgccgtcgatcactccgccgccgcgtcgccggagatctacggcttcactga

SEQ ID NO: 10205 - DNA, 157 bp, Glycine max
  Clone ID: 701103417H1
accacccaagaagccatacaaatacccttctcctccaccacctgtttataagtacaagtcaccaccaccaccgtacaaatattcatctcctccaccaccacctaaaaagccctacaagtatccatcaccaccacctccagtttacaaatacgaatca

SEQ ID NO: 10206 - DNA, 253 bp, Glycine max
  Clone ID: 701103418H1
tttccatcttagttcctggaggcaccaggaacctgacccaataaacaaacccttttttttctttctaatttttctaaagtttcattttttaatccaatggcaccttgggtattatcagaatgtagcttgaagcctcttgctccagtaatccctagacctagaactggggcagttttgtccagcacctcaaaggttggatttttggagacaaacaaggtattggaaggttctaagtttcaacctttgaggtgta

SEQ ID NO: 10207 - DNA, 254 bp, Glycine max
  Clone ID: 701103419H1
aatagtccaccttcagtgaagttcacctcagagatatggcaccccaatgtatatcctgatggccgggtttgcatatcaattcttcatcctcctggtgaggatccaaatggttatgagcttgcaagtgagcgctggacacctgttcatacggtagagagtatagtattgagtatcatatcaatgctttccagccctaatgatgaatctcctgcaaatgttgaagctgcaaaggagtggagacataggagggatga

SEQ ID NO: 10208 - DNA, 256 bp, Glycine max
  unsure at all n locations
  Clone ID: 701103420H1
cggctcgagctcgagccgattcggctcgagatggccgtacccttgccgattacacacattcagaaccangacaccctccacctggtgctccgtcttcgcggtggcatgcaaatctttgtcaagaccctcactggaaagaccatcacccttgaggtggagagctctgacactattgacaatgtcaaagctaagattcaagacaaagaaggtatcccaccagaccaacagaggctcatttttgctggaaaacagcttg

SEQ ID NO: 10209 - DNA, 238 bp, Glycine max
  Clone ID: 701103421H1
ctttctctcttcgcctggtcttggcatctccgcagcaccaccacccaccaccctgcttagaccaggtcctctctctctctagagagaaagagaaaaaaagaaaaaaaaaaacaactaacattaagcttttaatagtaagacatggctcaacccagtcccaacggggatctgaataataaccagcaatagggtcaggttcaacaataataccagcacggacatttggcggcggcggcgc

SEQ ID NO: 10210 - DNA, 254 bp, Glycine max
  Clone ID: 701103422H1
actgcaaagaccaaggtaattaatagctgcttgaatcctgtttggaatgaagagctgaatttcactctgacagaaccattgggagttctgaatttggaagtgtttgacaaagatcttttgaaggctgatgacaagatgggaaatgctttcttgaaccttcaaccaatagtctctgcagccagattaagagacatcttaagagtgtcctctggtgagacaacattaaggaaggtcatacctgatggtgaaaactg

SEQ ID NO: 10211 - DNA, 253 bp, Glycine max
  Clone ID: 701103423H1
ctcgagccgagcctttctccctaaagatagtcctcttcgcaaggatccggcatactatgtacttaacgaagacgaatctccttgcatttttggttctatcgagaagcagaggtggtcttatgcatgtgcaaaacagttgattgagaggctgatttttgctgagggtgctgaaaatggcttggagttcacaattgtaaggccatttaactggattggacctcgaatggatttcattcctgggattgatggtcca

SEQ ID NO: 10212 - DNA, 257 bp, Glycine max
  Clone ID: 701103424H1
gtggtatttttggaggacaacttagaagtttggtgagagctaaaggaaatagagcttctgctactgttcaaccatatctcttgctccatcttgacatctatcctgatgctgttcacacaattgaggatgcacttcacttgttttctgcaccagagactcttgaagggtaccgaacatcactcactgcaaaggccggtgttgtgactgcaaggaaatctgttcgaatagtgacactcccgaaaataatgatattgcac

SEQ ID NO: 10213 - DNA, 261 bp, Glycine max
  Clone ID: 701103425H1
ctcttctctctatcgtctccttcctctgttccattagggtttcctctttctccctcggagcttccaattgaaatccaattcctcaatacctccacactttctcgttcggaaagctcgcgaattcgaaagacatcgacggctccacgtgatacgttttcttcctctctggttatcaatgttggctcactagtgcagttgcatctttgcccgtattaccaccagtgagaagaggtggccaccacattgaacagaatgttgttt

SEQ ID NO: 10214 - DNA, 257 bp, Glycine max
  Clone ID: 701103426H1
gttgtttctgaggctgatatctttgtcaccaccaccggtaacaaggacatcatcatggttgaccacatgaggaaaatgaagaacaatgccattgtttgcaacattggtcactttgacaatgagatcgacatgcttgggctggagaactaccccggcgtgaagcgcatcaccatcaagccccaaactgacagatgggtcttccctgagaccaacaccggtatcattgtcttggctgagggtcgattgatgaacttggg

SEQ ID NO: 10215 - DNA, 262 bp, Glycine max
  Clone ID: 701103427H1
tcccaacacattctggtcaccggtggtgccggtttcattggcacccacaccgtcgttcagcttctcaaagctggcttcagcgtttcaataatcgacaatttcgataactccgtcatggaagcagtggaccgcgtccgccaagtggttggccctctgctttctcagaacctccaattcacccagggcgatctccggaatagggatgacttggagaaactcttctccaaaacaacatttgatgccgtgatccactttgctggct

SEQ ID NO: 10216 - DNA, 262 bp, Glycine max
  Clone ID: 701103429H1
aaccgacacaaagatctagtcctagctagaatcaaacaggggcgatctcaccttcaagaacacatcgccatggcaaggaacttgcttcttgtgctttttgcagtagccaccctcctccatggctcagcagcccaaaccagacacatgtcggtgatgccacgggctggatcatccctgctggcggcgctgccacctacaccgcctgggcttccaacaaaaccttcaccgtaaacgacactctcgtgttcaacttcgccaccgg

SEQ ID NO: 10217 - DNA, 261 bp, Glycine max
  Clone ID: 701103430H1
ttcaactcttctctttctctgtcgaagaacaagtagtttcagaaagatgctagagaatcttcaggctcctccgtcaacaacggaatcggccccagtggtgaagcgctatgctccacccaaccagaggaaccgttctgctaacaggcgcaaatcatctgatcggcttgatcggacaaacagtgtcgggaatgacttagaaaagaatcaagttgcttcttcaagaagtgttcacattccagatcatgaagatgctggtagcag

SEQ ID NO: 10218 - DNA, 263 bp, Glycine max
  Clone ID: 701103431H1
actcaactcaatcgcctccactctctcccgcaaaccattcttcttctcttctctccctctgagcctttcatcgctcctcggagagatggctgcgtccgaagaatcatcaaccactcagatggttggcaatgctttttttcagcagtattactccatattgcatcaagagccagaccaagtccacagattttaccaggagtctagcatcctacgtcgacctgaagaagatggtaccatgacaatggtgactactactctggaaa

SEQ ID NO: 10219 - DNA, 264 bp, Glycine max
  Clone ID: 701103432H1
cgaaacttgatctgcctttgctttgttatttcattaacagcacccctttgggccatatattggttacctcaactgcttttctgttcatctttccagaattattgtaaagttccctttttttgttctgtcttttcattcttttttcaaagtgaattcctgggattttttgttttcaattgagggcactaaaaaaaaagaactgactggaatttccatttgtcttgctgggtccctgagatttgaagtgtgttgttttccttttgg

SEQ ID NO: 10220 - DNA, 226 bp, Glycine max
  Clone ID: 701103433H1
taagtagcaagctagatactcaagcctatggtgatcatacctgtataatagcaaaagaacatttggagcctaacttaggagggctcactgttgagcaggctatccaaaacaagaagttgttcatcttagatcaccatgactatctcattccttatttgaggaaaataaatgcaaataccagaaagacttatgctacaagacccatatttttcttgaaagatgatgg

SEQ ID NO: 10221 - DNA, 252 bp, Glycine max
  Clone ID: 701103434H1
agcattttccccttcccagacagatccaagaaccacaggtactcactcttgagatcctgttttctctttttctcgttgcgtgtcttctgctgctcacacttaacgcgttttcttttttctccgaattaaacgcgaccttatcttcttcttgctctcttttatcagtgctcttttttgagccaacggtgctgattctttcccgcggaatcttgctcggcgttggggtgtaagtcatttgtcaattcccttgga

SEQ ID NO: 10222 - DNA, 250 bp, Glycine max
  Clone ID: 701103435H1
atcgttttagttaatttcaaaatgaagaaacgatggagtgcatgaatcttagaataatgattagcgattctgtgggattgttaggggaaaaaggtgaagaatcgaatcggtacgaacgtgattcttagctggagcgcgatgggggaagattattgtgaagatttgtctcgatcgaccagaaaagcccgtttactttttataaaaaaaaaaaaaaaaaacttttaaaagggggcgaacctttcatattcac

SEQ ID NO: 10223 - DNA, 246 bp, Glycine max
  Clone ID: 701103436H1
gcaacttgtattgttgctacaaggcatataaattttcatcattgcaagttgcaaccattttgaccaaaaaccaataataagctttcgaccaaaagaagaaagaagaacccatttatcatcgttggaaaaaatcccagatctcaaaaaatggaattttcgcagagtcacagggtagagatgataagcatggcagttgctcttgttgccattgttggtggcaccgcttactattactacgtcaccaag

SEQ ID NO: 10224 - DNA, 255 bp, Glycine max
  Clone ID: 701103437H1
caaaactccactgagaagaaccaaagaaagaaaggagaaagattgttagttttttttatcagcgaggaaatcgaatctgcgaatttttcctttctttcttttcattttatcacccaatcaatcttataactccaacttcaaaagggtttctctttacctctttcagtgcttctccctttgcccccagtaccgctgtctagcatttagttttaggtttttggagcttctcatattctcacatgggtcttctccttc

SEQ ID NO: 10225 - DNA, 252 bp, Glycine max
  Clone ID: 701103438H1
gaccatcaaagtttcacttcagccttatccggtttagggtttcggtttttgacccaacctttgacgtatcgaaaccttaagtttcggatcaggtctgagcaatctggttggtagaacctttggtcttagagagtcaagttttatgtctgaattagacgatcaaattcctactgccttcgatccttttgctgatgcaaatgctgatgactcgggtgctgggtcaaaggagtatgtgcatattcgcgtacagca

SEQ ID NO: 10226 - DNA, 253 bp, Glycine max
  Clone ID: 701103439H1
ctcgagccgctcagcttacccaactaaactatgtgattaaataacttaagcagagacattaaggcgcacaataatgacagcgaaacaagggaaggaagggataattgagtgtgtggtgtgtagtgtggcagctccgtcagcgtgagatggacgccgcagcaacaggttcggagctgaacaagtccggaagcggaggttcggagcgaagtgaggacagcggaggagggatatttgagtactctggctgggttat

SEQ ID NO: 10227 - DNA, 256 bp, Glycine max
  Clone ID: 701103440H1
tgagaacatcccaattgttctttgcggtaacaaggttgatgtgaagaacaggcaagtgaaggcaaagcaggttactttccacaggaagaagaatttacagtactatgagatttcagctaaaagcaacctacaattttgagaagcctttcctgtatttggccagaaaacttgcaggtgatcctaacttgcactttgtggagtctccagcattggctccaccagaagttctaattgatgtagctgcacagcaacaaga

SEQ ID NO: 10228 - DNA, 256 bp, Glycine max
  Clone ID: 701103441H1
cttctaacacatacactactctctctctctctcttattgtatggccgccaattccagtagccgagggatcaccgccttagggaagcgagtcgccaaccggatctggacttccaacgcacctcctctcacttcaaggaggggagcatacagtagcggctcagtgtacgacaagaaccctgatgatgagatccagtctgggcaggtcccagacgatgtgatccaggcggcaacacaatccggcaaatactgggcccca

SEQ ID NO: 10229 - DNA, 259 bp, Glycine max
  Clone ID: 701103442H1
cggctcgaggtttcgaatagattatcctaagtctttgggaatagtgctgcaatggcttcaagtcaggaggaggtgacccttttgggagctactggaagcccatttgtgtgcagggttcatattgccctcaagttgaagggagttcaatacaaatatgtcgaagaaaatttgaggaacaagagtgaactgcttctcaaatccaacccagttcacaagaaggttccagtgtttattcacaatgagaagcccatagcagagt

SEQ ID NO: 10230 - DNA, 259 bp, Glycine max
  Clone ID: 701103443H1
cgaagcaattgggtcggaggctgttgaggggcacgagcagagtttggccatgaaggtctggaactttgcctgccctgatgcccccggtggaatcgataacccctggatcaacccctgtgttcctggggcaccctctttggccactcttgcctgctctaagttgctcgttactatcactggcaaagacgagttcagagacagagatattctctaccaccacaccgttgagcaaagtggctggcaaggtgaacttcaactc

SEQ ID NO: 10231 - DNA, 258 bp, Glycine max
  Clone ID: 701103444H1
atctttctatcctctctctctctctctctctctctctctctctcttttccttcggagtgtgttcgcagattgatgacaagcaaccccattacgtggaagcctaagaggagaagacgacgaagaggacaaggttaactgaatcgccgcttctgtgtggcttcgttctttcgttttagttttttcatctttatagctttagagggtaatacattctttaaaaaaatggaggttttggtgggtcccgctttcaccatcgac

SEQ ID NO: 10232 - DNA, 259 bp, Glycine max
  Clone ID: 701103445H1
gatttattaaaaagacttgttttgaataacttttgcaccatacccgcaaaacttgtcttgcagctcacaacagcatttcgagagcgtggtttatgtaacaggaatgggacctttttttacaaggatcatctacacaaaagcaatacccctatcttagctattgctggagaccaggatctgatttgcccacctgaagctgtggaagaaaccgttaagctaattcctgagcacctggttacctataaagtttttggagaac

SEQ ID NO: 10233 - DNA, 258 bp, Glycine max
  Clone ID: 701103446H1
cggctcgagaagtctttctgcttcaaaatagacttatttaaggatatttgttgaacaacttgtgtcttgttgagttattgctgtttgaatttcatgtaaaatgatactagctatatgtaaatcccagaaaaaaaaaaaaaagaatcctaggatcttgttttcgttttggccatttcagttaataaagaaattatatttttcgaaaaaaaaaaaaaaaaaaaaaaaaaaaaaaaaaaaaaaaaatgaaaaaatatgagt

SEQ ID NO: 10234 - DNA, 261 bp, Glycine max
  Clone ID: 701103447H1
cgaacccgaaccaactaccaccacggtcaacgacatctcaaaccacaatgaacaagatcgtcctcttcgccgctcttttcgccttcttcttcatcctcattgaggccgctcccatgaagatcgtccctcagcctgctgcccctgcccccaaggccagcgtttgcgatgcctgcactgaggtcattggtctcctcgagtccgctggacttttgaccaactccaccgccactcagatcgagaccgccctcaaccaagtctgca

SEQ ID NO: 10235 - DNA, 233 bp, Glycine max
  Clone ID: 701103448H1
cagtgtttcatcatttgggtttcgcagaagagagagaaacccatttctagagagagaaactcgcagtcgcagacatgtcttccttcgatgccttcgccgacgacttgaacgtcaactacttcttccactcgccagcacgacgatgacgaggacaacttctctggctacggcggctactcctccttcaccggaggattctccgccgacggagatgtcgcggtcgatcacaccgc

SEQ ID NO: 10236 - DNA, 252 bp, Glycine max
  Clone ID: 701103451H1
cgcactctcttttcttcctcagaaacacatcctaatggcagagcgcggaggtggcgatcgtggcggcgaccgtggcggtttcggacgtggattcggcgggcgaggacgcggaggtgacaggggccgaggccggcgccgaggcccccgccgcgaggaagaggagaagtgggtcccagtgaccaaactgggccgcctggtgaaggagggaagaatccgaagccttgaacagatctacctccactcgctcccgat

SEQ ID NO: 10237 - DNA, 252 bp, Glycine max
  Clone ID: 701103453H1
atcccaacctgcataagcggaggtcacgcttggggtcaacaagaaggaggacctgaaatgtaatcgaataatatggaaactagaaggaagttgaacgatcagagatgacaatagcaagcttcgacactagcccagacgcgcgaacataaatataaaaaaaaaacaaaaaaaaagacaaaaaataataaaaaacaaacaaaaaaagaaaccatagtaactcaaaagcaaagaaagccctagacttaggcaacc

SEQ ID NO: 10238 - DNA, 242 bp, Glycine max
  Clone ID: 701103454H1
ggctcgagctccattgaggagttgcatgagacttgcaagcctttcttactctaaatctcagcctctaacacttgcaggcctcttcacccttgtcctcactctcttcctattcctctgctccacccaagtctgtttcaacgcaagagaaacaacaacagaggagtaagcagccacatgctgtcaccaccccacgatctaaaagaagaaagaaccagcttaagaaagtttgtcaagtaccagtt

SEQ ID NO: 10239 - DNA, 253 bp, Glycine max
  Clone ID: 701103455H1
cctcgacgaaatcaaggaaaccctaactcgtcaattttggggaatggcctccttcctcgctccaccgccatcagattctcattctccatccgatccctcttcgttcgtttccgatcaatccaatcatcgcgctgtttctccgaacgaagtaccgcaattggatgacgctgcgatttccaatcactctaattcggtttcggtgggatccgattcggatggggattgtggtctcgcgcaacgcgcgttggaatta

SEQ ID NO: 10240 - DNA, 253 bp, Glycine max
  Clone ID: 701103456H1
ctcgagccgctcgagccgattcggctcgaggtggccctcatggtgatgctggtctcactggcagaaagatcactcattgatacctatggtgggtggggacctcatggtggaggtgccttttcagggtaggaccctatcaaggttgacagaagtggtgcctatatggtgaggcacgctgcaaagagtgttgtggcaaatggccttgccagaaggtgcattgtccaagtttcctatgcgattggtgtccctgagc

SEQ ID NO: 10241 - DNA, 258 bp, Glycine max
  Clone ID: 701103457H1
agaacgttgaaggcattagaaagttggcgagctatatctgataaagaggattgtgatgctgaaattgctggttcagagtgcatggattattcagaagttgtaccatatgtccaccaggcgtttctggcagattggaggccacacacatctactcttacttatcctgaatgcatttccactacatctagagatcaaaatgttgctcacaatgcattttctcaaaaagatattcaattttataggggtactcatgattat

SEQ ID NO: 10242 - DNA, 260 bp, Glycine max
  Clone ID: 701103458H1
cataagcaaaagcaacggtgaactgaagatgccggttctcaccctttctactaacgttagccttaatgatttagacgcctcttcgatactctcccaagtaatctccaccgtcgccagcatcatgcgcacacctgagcctgtatcactactttcccccctctctctatgatatctatatatgaccatgatttatagcgttgatgttttatatatagaattaagttgaaagttaattcatgaaaattatttcaccccatcct

SEQ ID NO: 10243 - DNA, 257 bp, Glycine max
  Clone ID: 701103459H1
gagagaattaggaatggatgaggatcttcctgctgtattattgatggggggaggtgaaggtatggggcccattgaggctactgctcgggcacttggagattcattatatgacgagaatattggggctcccgtaggtcagatccttgtgatctgtggtcgtaataagaaacttgctaataaactgagttctattaattggaaggttcctgtgcaggtcaaaggatttgttaccaaaatggaggaatgcatgggagctt

SEQ ID NO: 10244 - DNA, 260 bp, Glycine max
  Clone ID: 701103460H1
ccccaaaccaaaccctctctcttccggcgttctgcgcgtcccgtcgcggcgattcccccctccggttccctctccacccttcaattcaaccctctcgtcttcgcttcactgattccctctttcaaaatgcttccgatcgcttgctagggttttccctctcccaaatctcctcctcggaaagcaccctgtaccttttattcctccgactaatcaacttctttgctatggctattcgtgtaaccttttccttttcgggctat

SEQ ID NO: 10245 - DNA, 260 bp, Glycine max
  Clone ID: 701103461H1
cttctcacttcgtcaaaaccaaccaaacccctccccaattctcaagccaaccatgtcttccttcaagagcaagtaccaagatgaactcattgccaatgctgcttacattggcaccccagggaagggtatccttgctgctgatgagtcaactggtacaattggcaagcgattggccagcattaatgtcgagaatgttgaagcaaataggcgtgctcttcgtgaactcctattcaccacacctggtgcttttgagtgcctca

SEQ ID NO: 10246 - DNA, 263 bp, Glycine max
  Clone ID: 701103462H1
caaaaacaacacattctatatataaaaaaacacacaattccgataacattattcccagccatcgcaagctgcatttggggatggtaatgggacaacagaaaatcgccctcgcccctccctcttcgtccttccgcctccgcagccgcagcctcaactccctccgcctccgccgcatcttcgacatgttcgacaagaacggcgacggcaccatcaccgtcacggagatcagccaggcgctgagcctcctcggcctggacgccgac

SEQ ID NO: 10247 - DNA, 261 bp, Glycine max
  Clone ID: 701103463H1
gttttgttggtgagaatgaagagaacgaacggatccgaaaggcgctgagagaattttttgacctgacgggggcgttcaatgtgtctgatgctcttccttatttgagatggttggatttggatggtgcagagaagaaaatgaaaaagacggcgaaagagttagatgggtttgttcaagtttggctggaagaacacaaaagtaaaaggaatagtgaagctgaacccaaaagtaaccaggacttgatggacgtgcttcttagcc

SEQ ID NO: 10248 - DNA, 263 bp, Glycine max
  Clone ID: 701103464H1
tttatgaccctcgcttgtgtgccacttccaactaacaagaggtattatgctgcaaatatttgcaacctcacttacgttgctgttgatgaatccagaattattgtaaagttcgcttttttcgttctgtcttttcattcttttttcaaagtgaattcctgggattttttgttttcaattgagggcactaaaaactactgtggaactggtgctgataaagcatatggccgtgatattgtagatgcacattacaaagcttgtattta

SEQ ID NO: 10249 - DNA, 192 bp, Glycine max
  Clone ID: 701103465H1
cgtcaacaacgattcctttcggttttctgtttctctggattcattttcatttttacggctaccagaatgtccagctcatcggaatattcggcattttccggcccccgcccggccaagtcgccggccgagaagtccactttctctcagacttgtagtctattgagccaatacatcaaggaaaaaagtgccttc

SEQ ID NO: 10250 - DNA, 241 bp, Glycine max
  Clone ID: 701103466H1
gagaaggttcttgttgatgctggctacattgatgctcagcaacaaccttgaatctcatctgcaacttgaggaagagggggttttgctgttttgatcatataatggcgttgacatagtttagtttatgggcaatttatgttgttttcttgttgcaactgttatttcctagatgtgcatttgtcggatttcttcttcttgtaagcccgttgatgcattcaattagaagctatatacatctacg

SEQ ID NO: 10251 - DNA, 251 bp, Glycine max
  Clone ID: 701103467H1
ctttttctcttacaagctactagaacaccgtttgctttgctctcacttcattttgcaaaacctctgggtatctaactctgcagccatgggaagtttggaagttgaatcaacaaatggtcacacctcaagtcctcacaaaaaaactgaaaaatcggagagagagaggagaattgatgagtggcttccaattacttctaaaaggaatggaaaatggtggtattcagctttccacaatgttactgccatggttg

SEQ ID NO: 10252 - DNA, 227 bp, Glycine max
  Clone ID: 701103468H1
ctcgagccgctcgagccgagagaatccgaggcgaagagaagagaacaattaagatggaggggcaggagcaacatgtgtcgctgggagcgaacaagttcccggagagacagccgattgggacggcggcgcagagccaagacgacggcaaggactaccaggagccggcgccggcgccactggttgacccgacggagtttacgtcatggtccttttacggagcagggata

SEQ ID NO: 10253 - DNA, 251 bp, Glycine max
  Clone ID: 701103469H1
gtcttggaatattgtttagaggacatttctgatgtgtacccttataatgaaggcttggttatgagtaacaaagtgaaggacaagtataagaagggctcaactaatgaaggacatgctttatttgtataagtacattcttatagattaaaaccaattatgaggtcagaatttctttcagctataccattggcagctaggataattcttggcactaagtattttattaaagattactttggagatattcctca

SEQ ID NO: 10254 - DNA, 248 bp, Glycine max
  Clone ID: 701103470H1
gggctttgtgttaatctgtttttcacttttccgattatgatgaacccggtgaatgaggtgatggagagacggttcttcgggtccaggtactgcttgtggctgaggtggatgatggtcttgatcataagcttggtggcgcttttggttcccaattttgcggattttctgtcccttgtgggaagcagtgtttgtgttgttctgagttttgtgctgcctgcgatgtttcattgtttggtttttaaggagga

SEQ ID NO: 10255 - DNA, 248 bp, Glycine max
  Clone ID: 701103471H1
ctcgagccggtcccctgctctcgccgcggcgcttcctactacaatcgcagacccggggcccacgtcaacccttacagccgcggttgcagcgccattacgaggtgcagaagctgaattttttaatttaatttattttttttcggatgtgaattggaatgtgttttcttgttgttgttatataaatttgttactattattattcacgaacatttgtggtaatccatttcgggttgctgttgtttatttgg

SEQ ID NO: 10256 - DNA, 239 bp, Glycine max
  Clone ID: 701103472H1
agagcgacgaaataagtgtggcaaagcccacgcccgaggcgaataaaatgttttaatcgcgaataatgaaagcaaaataatagcagcagagagattattattgttaataataaaataaaatgataagatcagtgagacaattataaatgacatgttaaatatttaatgaagattaaaaaggaaagaaggaggtgggttccttacgcccaacgcatctttgttggttcggggtcggagct

SEQ ID NO: 10257 - DNA, 252 bp, Glycine max
  Clone ID: 701103473H1
gcccgttggtgccataatagcaaggtatttgaaggtgttcaaatctgcagaccctgcttggttttaccttcatgttacatgccaaacctctgcctacatagttggtgttgctgggtggggaactggtctcaaactcggaagtgactcggttggtattaagtataacacccatagagcactcgggatcaccctcttctgccttggaacccttcaggtttttgctctgctcttgaggcccaacaaagaccacaa

SEQ ID NO: 10258 - DNA, 257 bp, Glycine max
  Clone ID: 701103475H1
caggtatctgttccttcatcttccccaactctccatcacataccccatacctgttctccttcttttcccctttatccaccaaagccagggttttctctttcaattttcattttcatgcctctcagattcacgggattatgttttttctgtcgcacaaaccctttttcttcttcggtgtaaactcctattccttgttgcaatcgaaaagggtccctttgtctgttcttgtctactgttgttgatgtctattactgttg

SEQ ID NO: 10259 - DNA, 260 bp, Glycine max
  Clone ID: 701103476H1
caccagtttacaagcctcctatagagaagccaccagtgtacaagccaccagtgtacaaaccaccagtgtacaaaccaccggtgtacaagccccctgttaagaaacctcctatttacaaaccaccttacccaaagtaccctccaggctccaactgaagacacccacctgattttgaattaagttaagggatgtattaagtatatgctaaataagaggtgtatctacaaccattgactttgtcatgctcaaaaatttagttt

SEQ ID NO: 10260 - DNA, 257 bp, Glycine max
  Clone ID: 701103477H1
gaatgcataaagtttggtggcatctgatcctttttcgatcccaaataacagaagagaatgagagtatcactggtaggtttgattatttaacagaaaaacggttggaaaatgggaggttgctgttgttctgccaggaaacctcacctgcatggaacgccagtgtattactattgcccaccaactttagaagagcatgagtctttaacgtctaatgatggtacggctacgtcactcactactggattgctggtaggctt

SEQ ID NO: 10261 - DNA, 258 bp, Glycine max
  Clone ID: 701103478H1
ctcgagccgaatcggctcgaggacctgttgaatgctctaggttcactgtatactgctgttctcttccttggaatacaaaatgcttcctctgttcagccagtggtagcagttgaaaggactgtcttttatagagaaaaagctgcgggaatgtattctgccttaccctatgcatttgcacaggttctggtagagataccatatatcttcgctcaagctgtgacatacggtttaattgtttatgccatgatcggatttgac

SEQ ID NO: 10262 - DNA, 258 bp, Glycine max
  Clone ID: 701103479H1
atcatacccaacaacatcctccgacaccatgttgcacatggaaaaccccctcctgcagtcaacaaactcaattaccttcacattctttgggctgttgttatttctctttgttctttcatccatattcagaaaccgcggtgctgcaacaagataagcaccaccagatgctagatgcgcgtggcctttaattggtcacatccacctcttaggtggctcaaaaccaccccatgtcacgttgggccacatggcggacaaata

SEQ ID NO: 10263 - DNA, 263 bp, Glycine max
  Clone ID: 701103480H1
attttcctttgtttctatggcttctgcagaagtagagttccgatgctttgttggtgggcttgcgtgggccaccgaccacgatgctctcgagaaagccttctctcaatttggcgaaatcgtcgaatcgaaggtcatcaacgatcgtgaaactggaagatccagagggtttggatttgtgaccttcgccacagagcaggcgatgagagacgcaattgaaggaatgaacggccagaacctcgacggtcgtaatataaccgtgaacg

SEQ ID NO: 10264 - DNA, 249 bp, Glycine max
  Clone ID: 701103481H1
aagtgcgttttggaagcagagaccgaaatacttcgagatggcccgtacaaagcaaactgctcgtaagtcaactggaggaaaagctcccaggaagcagcttgcaaccaaggctgcacgtaagtctgcaccaacaactggtggtgtgaagaagcctcatcgttatcgccctggaactgttgctcttcgtgagattaggaaataccagaagagcactgagctcctaatcacgaagcttcctttccagaggtt

SEQ ID NO: 10265 - DNA, 250 bp, Glycine max
  Clone ID: 701103482H1
caggacttaaaaatatctctgatccaccacctggtggcactagaagaagaacgacaattcccacgggcatttatgctccccctaaccgtgatcacattgctctggcgttggcaatggcttaccaagaggtcaccaatcaccataaacagcgccctcctatcaacgatctcgggccaaatgataagcttcctagctgattcacttactgctacttaccctctcagggtttcgaggcctgggtccttaagca

SEQ ID NO: 10266 - DNA, 250 bp, Glycine max
  Clone ID: 701103483H1
cggctcgagcttcctttgtaatagaaagcacgcgtttctctctctccctctctcaacgaatatttagtgtacttcctcttttgtgggtagattcaatttaccatgtcgagttcatcggaatactctcaattttccggccagaaaccggcgaggtcgccggagaaatcgagcttctctcagacttgtagcctgttgagtcaatacatcaaggagaagggtagcttcggagatcttaccctcggaatgacat

SEQ ID NO: 10267 - DNA, 250 bp, Glycine max
  Clone ID: 701103484H1
aaatcatggatttcttgcaagcacaagaaaatcagatacttgtgggtgtggccgtggccgttgtagccattgggattggtgcagtatatctctattcatccaagaagaccaaaggttgcttggacccagagaactttaaggcattcaaacttgttaagcgtgcacagctgagccataatgttgcaaagttcacatttgcactcccaacacctacatctgttttgggtcttccaattgggcaacacataag

SEQ ID NO: 10268 - DNA, 248 bp, Glycine max
  Clone ID: 701103485H1
caaacaaagaactcactcaaactcaacatagagagagagagagagagagagagagagagagagagatatatgaccgattacgaagagagatacgaagggcacggagaagaagaggaacttcacaattctcatcatcagtctcatcctgattcctctcctttacccacccacgacgatctcaccgattccatatctcgccatggatctcgcgattatgacagagattcttccagaagcagagataagga

SEQ ID NO: 10269 - DNA, 249 bp, Glycine max
  Clone ID: 701103486H1
ctcgagccgctcgagccgttaagattgattactgtgtctatcacgttaacatccattttttacaaatcaaacttgtggatgtcatgtttctaatatccattttgcattccctcgaatctcggaacccctcacgtttctaatatccgttctgcaacttcccaaatgttgcaacgtcgtcgctgtcgtcattgtggccaccgcgtctgccattcactgcttccctctctgcaacggcgcttcgcagtctca

SEQ ID NO: 10270 - DNA, 253 bp, Glycine max
  Clone ID: 701103487H1
attgtttacacgaagccaagggcaaacccaatccaataaacaacactgttcagagacccgtgagtcttcgtcagttccaattcgttaccgcgaaaatgaacgaacccacgagaaaataccgcaagaagaacgaagaaggatcaagatcaacccagaagaataacaagaagaaagaactaaagagcatcctcacttcgctcttgttcgtggatgcaggagagaaaaatgaagaacaacacaagaaaaaggagga

SEQ ID NO: 10271 - DNA, 112 bp, Glycine max
  Clone ID: 701103488H1
acacgattgtgctatgccctgtcctgtaataatctacttcgatagtcttgggtggatgtctttgtagccttgatcgttgttattgaaattcatcctcattttctgtacctct

SEQ ID NO: 10272 - DNA, 256 bp, Glycine max
  Clone ID: 701103489H1
ctctcaccatggaggcgcaaccaccaaccccctcgactgcaccgccgcctctgccgccacacctcagctaccccgactccgtggaatcctcgcctcgctcccgcaacaccgactcctgggacgagcccttcgcgccggcgtccaccaagctccgtctcatgtgcagctacggcgggcacatcgtcccccgtccccacgacaagtccctctgctacgtgggtggcgacacgcgcatcatcgtgtccgaacgcgccac

SEQ ID NO: 10273 - DNA, 258 bp, Glycine max
  Clone ID: 701103490H1
caaacatgtccaccgcaacaactcacgtgctcgcttatcccttccctacctccggtcacgtgatccctctcttagacttcaccaaaaccctagtctctcgcggcgtccatgtcaccgttctggtcacaccctacaacgaagccttacttccaaaaaactattcccctcttctccaaacgcttctcctccccgaacctcagttcccgaacccgaagcaaaacaggctcgtatccatggtaaccttcatgcggcaccacc

SEQ ID NO: 10274 - DNA, 257 bp, Glycine max
  Clone ID: 701103491H1
cgggactttcactagccgcagcagcctcaggaggagaataaggatgtctcacaggaagttcgagcacccaaggcacgggtcactgggatttctccccaggaagcgtgctgctcgtcacaggggaaaagtgaaggcattccccaaggatgacccatccaaggcacccaagctcactgcattcttgggttacaaggctggtatgactcacattgttagagaggtcgagaagccaggatcaaagcttcacaagaaggaaa

SEQ ID NO: 10275 - DNA, 227 bp, Glycine max
  Clone ID: 701103492H1
aggaataataatgttttcttctctatgcttttacttcatgagaatgatccggggacatggaggaaatgccagtgctgtgaccacgtgagggctcggaaaagttggatttcctccatgtccccggactattctcatgaaggaaaagcaaagagaagattatataaggaataataatgtttcctatacttggcgttggcctatttatggtgcaatatttagaggttaca

SEQ ID NO: 10276 - DNA, 245 bp, Glycine max
  Clone ID: 701103493H1
tctcgagccgaatcggctcgagattcctagttcttagaagttacttgccttcagcaatcagcacagtatgaaaagataaataactgggaatacactgaagaacacagctacagatatttatcttttcatactatgctgattgctgattcctagttcttagaagttacttggattccttaccagaaaagaaagtagaagcaaataggcgaaataaaagtgggggcctcaccaccacagctggcgct

SEQ ID NO: 10277 - DNA, 256 bp, Glycine max
  Clone ID: 701103494H1
attttccacaatgtaactgtgatgcaatcaaataggttaagatgtacaaacaacagaatgatacttgtaaatatgggaagaagtgcgacaacagaaaatcgctctcgcccctccctcttcgtccttccgcctccgcagccgcagcctcaactccctccgcctccgccgcatcttcgacatgttcgacaagaacggcgacggcaccatcaccgtcacggagatcagccaggcgctgagcctcctcggcctggacacc

SEQ ID NO: 10278 - DNA, 254 bp, Glycine max
  Clone ID: 701103495H1
gattcttccagctgataaaccatggtgttagctcatccttggtggagaaagtaaagttggagattcaggatttcttcaagcttccaatgtcagagaagaaaaagttttggcagagtccacaacatatggagggttttggacaagcatttgttgtgagtgaagaccaaaaacttgattgggctgaccttttctttatgactactcttccaaaacatttaagaataccccacttatttccacagctccctcttcct

SEQ ID NO: 10279 - DNA, 238 bp, Glycine max
  Clone ID: 701103496H1
ccccgctggtgatccttcagctgagaggttgcgctccaaatttcagcacctgacgttgcgatgatgaaccatggtatggtattgagcaagaatataccttgttgcagaaagatgtaaattggccacttgggtggccacttggtgggtttcctggaccacagggcccatactactgtggaactggtgctgataaagcatatggccgtgatattgtagatgcacattacaaagcttgtat

SEQ ID NO: 10280 - DNA, 249 bp, Glycine max
  Clone ID: 701103501H1
attttccataaaccacattctcgttggttctctttcaatggagtctaagcttttaagagccaccaccatctcagtcccttcaacaccctcatgcgctttccatcgcacaactcgcaaggcttcgatttccttcaaccccacctcggatttcgccccaaaaagcaatctttctctccaggcacatgcggcttccatcgagtcagtgccaacaaagaaaagaattgatgagagtgacacctgacccttgat

SEQ ID NO: 10281 - DNA, 244 bp, Glycine max
  Clone ID: 701103502H1
gtgcattccacacgctgcttccgattgaaggcatctaaggagagaaaaatgcacgatttctgcttcacgatcccctacggattgatgttagtgggtggtggactgttcgcctacataagcaaagggagcatcgcttctctcgccggaggcacggctccggtttgcttctcatcgtcgccggctatctcagtctcaatgctttcggcaaacgaaaaaactcttacctcgctctctttctcgagac

SEQ ID NO: 10282 - DNA, 243 bp, Glycine max
  Clone ID: 701103503H1
cttcattttgttgataattctctgaacttgaggtcagcaccaccgatagataatgtggttcctcaaagccagccacttgtaattcatgttcctgctttgcctaggaatagacaatcatttagatggagtggtggttctagctccagaaacatccattcatcaaactcagttatatgcgcagacagggatcagcaggatgcaagctcaagaagaatgtctagaaatatgttagaacatccagtc

SEQ ID NO: 10283 - DNA, 244 bp, Glycine max
  Clone ID: 701103504H1
ctctgtttctactttgaggcctccgttgttggtgggtgggtctaccttctctcaaaatggccaccggagtgaacagaaaaatttctgctgcatcagctctggcccacaccagaagggcaaagaaaaccaattccctttccctcccatcgggaattcttggaacagcactagcagtgttgtttattgggtttttagcatgggcttatcaggttattcaacctcccgatcccaagataatgtggca

SEQ ID NO: 10284 - DNA, 244 bp, Glycine max
  Clone ID: 701103505H1
cctcgagccgaatcggctcgagaattcatacaggcttttaaattgccgttatttgcaaataactgtctcctaacagcaactgccttgaagcgtatttttgagaaagtggacgtgaatggcgacggattggtgagccttgaggaactgaatcgattgcttcagatgacgggcaattcccaatatagcatagaagagttggaatcacttgtggaaaagaaaagtcttggtttcagtgatttcttgt

SEQ ID NO: 10285 - DNA, 243 bp, Glycine max
  Clone ID: 701103506H1
aattaataacaagctagctattagttcgattttgtagtaagtgaggtgccaatatggtgaagatagctcttggtactttggatgactcttttagcgctgcctctcttaaggcttatttcgcagagttccacgcaactctgattttcgtgttcgctggtgttggatcagccatcgcttacaacgagcttacaaaagatgcagccttggatccaacggggctggtggcagtagctgtggcacatg

SEQ ID NO: 10286 - DNA, 244 bp, Glycine max
  Clone ID: 701103507H1
ctcaacacagaagcagaaggaggagaagcagaaagaggagacgaagcaatggcgccgaagaagccccgaaccacgtcgaggaaccctgatttggtcaggggaattggcaaatattcgaggtcgcagatgtaccacaagaggggcatctgggccatcaaggccaaaaacggcggtgttttgcccctccacgatcccaagcccaaacccgaggccccggcccagaagccgcccaagatctacccgg

SEQ ID NO: 10287 - DNA, 245 bp, Glycine max
  Clone ID: 701103508H1
ctcgctgcttattttgatttgaactttgaagttttgttattttgtgcaatggcagccaagagcaaaatcctagtccttggaggaacaggatacattggaaaattcatagttaaggcaagcgcagaagcaggacaccccacttttgccttagttagagagagcaccctttctcatcctgaaaaatctaaacttattgagagcttcaagacctccggagttactcttctttatggtgatctaactga

SEQ ID NO: 10288 - DNA, 244 bp, Glycine max
  Clone ID: 701103509H1
cagaatcattaaagataagattatattgctaagaagaaaaaatatgaaggttgtctacttgcttgttgccctcttggctttgacatcaactgttgtctctgcctatgaccctagtcctctgcaagatttttgtgtggcagccaaagaaaaagatggtgtatttgtgaacgggaaattctgcaaggaccccaagcttgtcaaagcagaagatttcttcagacatgtggaacctgggaaaactgac

SEQ ID NO: 10289 - DNA, 242 bp, Glycine max
  Clone ID: 701103510H1
catctgaggcaagttttcagccagtatggagaattagtgcatgtgaagattccagcaggcaagcgatgtgggtttgtccaattcgcagacaggagctgtgccgaagaggcacttcgggtgttgaatgggaccctgttgggtggtcaaaatgttcgtctttcatggggccgcagtccttcaaacaaacaggctcaggcagatccaaaccagtggaatggtggtgctggttctggtggtggata

SEQ ID NO: 10290 - DNA, 243 bp, Glycine max
  Clone ID: 701103511H1
ctcttcccatcttcctgacgatagtggcacttggtttccttgagccagtgctagatcagaacttgtacaacatggggatgaagatgacctcaacaacgtttgcatctgccactgttaatgtcctcccggccattacttttgtaatggcactcattttcaggctagagaaggtgaacttgagaaaatttcacagtgtagccaaagtcattggaacccttataacagtttcaggagctatggtta

SEQ ID NO: 10291 - DNA, 199 bp, Glycine max
  Clone ID: 701103512H1
ggagccagcgcgtgaccaggaaggcgattttgagttggtataggctatagtgtctgactgattgcatgtgctctgtctttttattctactctatgatccgggtgcctgagtggctggaacatttttattattccgcattagtataatggcttgtagtttgcattgtgacacgaaatgatataaactgcactttacgcac

SEQ ID NO: 10292 - DNA, 243 bp, Glycine max
  Clone ID: 701103513H1
ccttcttacacggagacattaaagttcttgcagaaattaaaagcatgccatgcctgaactcgtttgtttcagcggaagatatgtaaatacctctagaagagctagataggtgtttggattggcagttatatgtcaaaggcatgggaagtccatagatcatgtgagttcgacttgatacagcaactaaaaccttgtcttattaggtgaaatcaactacatggatagaagttttaaatttttaat

SEQ ID NO: 10293 - DNA, 243 bp, Glycine max
  Clone ID: 701103514H1
caagaacctcgacgatatcgacctttcctttaacaacctctccggccccataccaagctcgcttggtaaactgcctaaactcgcgtatctagatttgagccgcaacaagctcacgggctcaattccggcctcatttggatccttccaaaagcccgggccggctattatgctcactaaaaaccagctttcagggcgccttcctgcttctttggccaacttagactcggacaggatagacttgtc

SEQ ID NO: 10294 - DNA, 242 bp, Glycine max
  Clone ID: 701103515H1
cttccattcacaaccttaaacctttctttcttgtaaactttatacattgattctgagaatagaactaagagggtatagacatggctagcgcaattgcagcttcttttttggttctgcttctggctttccccactgtatttggagctgaccatgaagttggtgacactagtggatgggccctcggagttaattacaacacctgggcctctgggaaaactttcacagttggtgacactttggtg

SEQ ID NO: 10295 - DNA, 243 bp, Glycine max
  Clone ID: 701103516H1
cgacacgacaccaaatattctcactcgtcgtcttcgtctgcgccctaaccaaattcaattcaaactcttctcatcaaaatccaaggctcgttcttgaaaccctaattcgatatcctcctcctcagaagaagaaggatcgatgtgggcagcttcttgcctggcgtcatgctgcgcggcctgcgcatgcgacgcctgcaggaccgtcgtatcgggaatcagccgccgttccgccaggatcgccta

SEQ ID NO: 10296 - DNA, 247 bp, Glycine max
  Clone ID: 701103517H1
tcctggttcttggaaaatttggaatattggcacaatattcacgatacttgtatcctttacgaggggcaaatggggacccttgctacaattgaaagagaaagttgaaacaacaatagacgaagcacaacgagtagtagacattatagaggacgtggctgagggggtagataaggtcgcggtgtcagctgtgaagcatcttcccgatggaaaatttcgtgatgctgttgaatttgttgaaaaagtagct

SEQ ID NO: 10297 - DNA, 245 bp, Glycine max
  Clone ID: 701103518H1
atcaattcggcagataaaggtagtagtagtgttacgttcgaattcgaattgttccatttgcttcgcaaaagttgcaactacttccacagaaagaaaaaaagtttctaagttaaggaaatccagagtgaaaaaaaaaaaatggccggtgacggtgcagctacatgcatagacatccttcttgccattattctccctcctcttggtgtctttctcaaatatggttgccaggtggagttctggatttt

SEQ ID NO: 10298 - DNA, 221 bp, Glycine max
  Clone ID: 701103519H1
ttctagttttcctatcatccaatctctttagttagctcctgctccttttctgccagaagcttcaaggaaaaacaaagaaatgagacttggatttgcttcttggagattcatcctatgcaccctagttgtctttttgattctacaagacagtgtagctagaaagatagctacaacatctgggaatgaagttcaactgaaggaagtatcctatgatttgcaaa

SEQ ID NO: 10299 - DNA, 244 bp, Glycine max
  Clone ID: 701103520H1
ctcactcgttcattccaacctacccttattcttcttcttcaattccacacccatcatggaacgatttccgatcctctttctcctcgccaccctcatcaccctcgcctccggtgcccgccacgatattctccggttaccctccgaagcatccacttttttcaaagcacccggtggcgatcaaaacgatgagggcacgaggtgggccgttttaattgccggttccaatggctactggaattacagg

SEQ ID NO: 10300 - DNA, 242 bp, Glycine max
  Clone ID: 701103522H1
gcttcgttgaaggagatgaggaacggtggtgaggattatagcaatggtcatggtggtggtggtgtgagggacttgtatggagaggattgtgccactgaggaccagcttatcactccatggactttctctgtggccagtggatgcagtttactgagagatccacgctacaacaaagggctggcctttaccgagggagagagagatgctcattacttgcgtggccttttgcctccagctatctt

SEQ ID NO: 10301 - DNA, 240 bp, Glycine max
  Clone ID: 701103524H1
ctcgagccgctcgagccggttcgattttgtagtaagtgaggtgccaatatggtgaagatagctcttggtactttggatgactcttctagcgctgcctctcttaaggcttatttcgcagagttccacgcaactctgattcccgtgttcgctggtgttggatcagccatcgcttacaacgagcttacaacagatgcagccttggatccaacggggctggtggcagtagctgtggcacatgca

SEQ ID NO: 10302 - DNA, 242 bp, Glycine max
  Clone ID: 701103525H1
aaaaagactcagttgtgtatcgttgcagctctactagctagggtttcgcaagtgcgatcgaagaagaacgatggcgatggctgctgctctgcgtcgcgaaggaaggcgtttgatccaaccaatcaacgccctccgttcctctctcatctctcaagaccaatcccctcatggcgcgcgcttcatttccactcaagtggtgagaaaccgaatgaagagtgtgaggaatatccagaagatcacca

SEQ ID NO: 10303 - DNA, 241 bp, Glycine max
  Clone ID: 701103526H1
gtcatagaattcacaaccgacaatggcgacaaaacctcgtttggcttatctctcttccacttttcttcttcttcttgttgtaactgtctttacttcggtgtcggcacaagccccagaatccccatcactctacaacaccttccttcaatgcctcaccaaatacacaaataacccctccaacatagtcttcgccaacaccaaccccaagttccccactatcctccaaaactacatccgaaac

SEQ ID NO: 10304 - DNA, 225 bp, Glycine max
  Clone ID: 701103527H1
ctctctatcgattctcgtaacaaaccctacccttttgagtcttccaagttttcaccatcgtaatgggttccgaaggatccagcgtcgtggttcctaggaatttcagattattggaagagcttgagagaggtgagaagggaattggggatggaactgttagctatggaatggatgatgctgatgacatatacatgcaatcttggactgggactatcatcggtcccc

SEQ ID NO: 10305 - DNA, 241 bp, Glycine max
  Clone ID: 701103528H1
agaatcccctcttctgttcttggatgggtttccttcatcaccctcttccctgaagccacataaccccatggcaatggcactcgacgcagcactctggatcgtgaagatgacatggattgctctcagtggctggatttcttcttgtttaactgtcgctgacgaattcgcctcttctctacgctctggcgatattggcccctttcatgtgggttgatccatttacgctctctatttcctccaa

SEQ ID NO: 10306 - DNA, 242 bp, Glycine max
  Clone ID: 701103529H1
attcgccgcagcccctgctccggcaacgccgagctcaccgtgccggagaacctggactccaccatgcagctcctcttcatggcctgccgcggcgacgtcaagggagttgaggatttgctcaacgaaggcatcgacgtcaacagcatcgacctcgacggccgcaccgccctccacgtcgccgcctgcgaaggccacgtcgaagtcgccaggctacttctcagccgcaagccaacctcgacgct

SEQ ID NO: 10307 - DNA, 242 bp, Glycine max
  Clone ID: 701103530H1
gttcgtgacatgaaggagaagcttgcttatgttgccttggattatgagcaagaacttgagactgcaaagagcagttcttcagttgagaaaaactacgagcttcctgatgggcaagttatcaccattggagctgagagattccgttgccctgaagttcttttccagccttctatgattggaatggaagctgctggaattcacgagaccacctacaactccatcatgaagtgtgatgtggatat

SEQ ID NO: 10308 - DNA, 243 bp, Glycine max
  Clone ID: 701103531H1
cttcattcctcttactctcacaccctcaattccaccgtcacttccctctctacgattgcacactcggcacgtggcgcaatttctctctctcactctctgattcattccactcttttccttctttcagcactcttatctcctctggtggtctcttttgcctatcagattccacatcatgttccttgctcgtgtgcaaccttttggccaagtcctctagaaagattcaatacccaagtttctctc

SEQ ID NO: 10309 - DNA, 245 bp, Glycine max
  Clone ID: 701103532H1
gcttgcttgacttgccaactttaagtttgtcaatttccgtgctgcttggtaggttgcaatcgcaagtgaacaattggctagcgcgtactagttttgaatcacaatggcagaggatgatggttacacgagagatggaacagtcgattactgtggaaatccagctaataacaaggaaactggaacctggaaagcctgcccctatatcttaggaaacgaatgttgtgagagattggcttattatggga

SEQ ID NO: 10310 - DNA, 244 bp, Glycine max
  Clone ID: 701103533H1
cactgcatatatgaatatacgaaattacgagagagagagagagagagagagagagagagagaagcgttaatctgaatgggttacatccaccatggaagaaccggtctcaggcacatactcagattcagaaccgccaccggcgtggtctcaaactccggcagatcgcaatcgcgcgctgcattcccctcccattcccctatcctcggcaacgtgctttttttctcaacaggcgataaatacctca

SEQ ID NO: 10311 - DNA, 243 bp, Glycine max
  Clone ID: 701103534H1
gtgatatggggtacctcaattcagttttgtcctcttcaagccaggttcatgctgcagaagattcacctgtcagtggagggggcctcagtcagaatggaaaattcagctatgggtatgctagctcccctggcaagagatcttcaatggaagatttttatgagacaaaaattgatggtgttgatggtgaaattgttggcctttttggagtttttgatggccatggtggtgctcgtgctgctgagt

SEQ ID NO: 10312 - DNA, 227 bp, Glycine max
  Clone ID: 701103535H1
ttacaatggtcacagatgtcacatgtgtttgagatctgattcgctttacaaagtgatggagcggttggctaatcctggggttaggagacttgtggctgtggaggctggcagcaacgtgtggagggatattctttaagcgatgtgtcagattcttgtaggctgttgggataatttccggcttatatgaaggaatagctgtggttgcattggaaggactcgtttgtcta

SEQ ID NO: 10313 - DNA, 77 bp, Glycine max
  Clone ID: 701103536H1
ccctcgtgttctgggcgaagaccatcataatgtctgagatgacgatcataaggtgtgtcatactccattattagtag

SEQ ID NO: 10314 - DNA, 239 bp, Glycine max
  Clone ID: 701103537H1
aatttctctatttttcctccgtttctattgcaatttctcaattactacatcgtattctgcgaattcaaactgggtcttggttttctgaaagatgggaggtggcaaggacaagcaccatgatgaatctgacaaaggaattttttcacagcttgctcatggggtagctggtgcagcacatggtggacatgggtacccacctggggcttacccaccaccacctggggcatgacctccgcacc

SEQ ID NO: 10315 - DNA, 242 bp, Glycine max
  Clone ID: 701103538H1
gaagaagctcagatcggaaaaattcacctctccaatcccaatcccatcgttgcaaatgatccgattcattctgttgcagaacaggcagggcaagacccgtcttgccaaatactacgttcctctcgaggactccgagaagcacaaggtcgaatacgaggttcatcggctcgtcgtaaacagagaccctaaatacacaaatttcgtcgagtttcgtacgcacaagataatatacaggcgatatg

SEQ ID NO: 10316 - DNA, 239 bp, Glycine max
  Clone ID: 701103539H1
ataaaacccatttttccctcgccctcgacgaatcaaatgcgtaccaacatagcattacccatggtgctaaccgggttactactctattctcgctccgtaatctccatgctcttcctcggtcgcgtcggtgagctcgccttagctggtggctctctcgccattggattcgccaacatcacgggctattctattctctcgggcctcgccatgggcatggagcccatttgcggccaggcttt

SEQ ID NO: 10317 - DNA, 242 bp, Glycine max
  Clone ID: 701103540H1
ttttggctctagctgctagagattccactgttcttaccggtggaccaagctggggagtacccttgggcagaagggactctcttggtacgagtattagtggctccaataacaacattcctgctcccaacaacacatttcagaccatcttaactaagttcaagcttaaggggcttgacattgttgatctagttgctctatctgggagccacactataggaaattcccgatgcaccagcttcagg

SEQ ID NO: 10318 - DNA, 239 bp, Glycine max
  Clone ID: 701103541H1
cttaaacctggagagaaccctaggcctcggcctaaagatcgccaactgattcaagatcgtgtaaaagagttgcgggaaattgtgccaaatggagcaaaatgtagcatagatgcacttctggaaaagaccatcaagcatatgcttttcctgcaaagtgtaacaaagcatgctgacaagctgaaacagacaggggagtctaagatagttagtaaagaaggtggattgctattaaaagataa

SEQ ID NO: 10319 - DNA, 242 bp, Glycine max
  Clone ID: 701103542H1
ccccgagcgaatcggctcgagctttcataaaaaaacaatctccaacaccaaacacaccacacggaaatcagccaaatcccgacttttcacccaagaggactactctcacttctacaacctctacgaagacacagactctaacaacagtctcaacaataacaacagcaacaacaagagaaagcgtaacaacagaaaagaagaaggtagtggtggaggtgcagaacaaaaagggcataatggta

SEQ ID NO: 10320 - DNA, 241 bp, Glycine max
  Clone ID: 701103543H1
tagaatcccctccaatccctctttgtctttgtgcttttctttagttctttccaaaacagcaacaatgatgagttgccaagcatggcctgaacccatagttcgagtccaatccttagctgacagtggcctaagctcaatcccttcacgctatattaggccacactcccaaagaccctccaacaccatgatcatgttaacatccccgttattgacctggaacatcttttctcggaggatgaaa

SEQ ID NO: 10321 - DNA, 240 bp, Glycine max
  Clone ID: 701103545H1
atccaaattctcgagtctcaaatcagtgaaaagttggaagaagtgaagaagaaggacaaaattatagcagacaaagaaaattccattgaagataaatcaattaccatacaatccttgcagaatgagattgcttctctccagaaaaaagggtcactggatgctgaggagcaggttggaaaggctcatgcacgtgctggtgaactacagaagcaggtggacaaacttaaaagggaactagaa

SEQ ID NO: 10322 - DNA, 241 bp, Glycine max
  Clone ID: 701103546H1
agcttgcacctattggtatcttctacaatatcctaaagtgtttttcttcttcttcatcaccatgtctttactttcagacctcatcaacctcaatctctcagaatccacagaaaagatcattgctgagtacatatgggttggtggatctggtatggacctcagaagcaaagccaggactcttcctgggccagtgagtgaccctgcaaaacttccgaagtggaactatgatgggtctagcaca

SEQ ID NO: 10323 - DNA, 240 bp, Glycine max
  Clone ID: 701103547H1
atagtcccatgcaacttggtgatattagggccaatcactgtggtgctgaaggaatggtcctcaagtcgtcacttcctgtgaaggatactggttcaacttcaactgctggcgtgtgttattgatctataaagattggaaagaaatccattcaggttctatttgaacatattgatgaactggaattgtaataaaattgattaatataaataagatccttatgagctatgtataacttgaaca

SEQ ID NO: 10324 - DNA, 230 bp, Glycine max
  Clone ID: 701103548H1
tgagattttagcaagtcaacagtcgtcgactacgtctgtggactaatcaaaaccaatgcggactgaagaactgtcgcctgaacgtacgtatcttgaaacgctaattcgatatcctcatcgtcagctgagaaagagttcgatactactgcttttgaaagttctcaatcgcatagtgggtcctattatggtgccgataattccaattataatagtaatcagccgccgttccg

SEQ ID NO: 10325 - DNA, 243 bp, Glycine max
  Clone ID: 701103549H1
caagaacaagatcaatggaaaaagttcgcaggatcgccttgtatctggatcaagatgttgataggttcttcccttcacacttgaaaagacaccaccatttaaggtctcttctttgctaccatgaaaaggcagttaggctaagtgaatgggggctgatgaagtctttttttaacaaatgtaggttacttagagtgttgaatttggaaggaatacagtgtcagggagggaagttgccaaaagaaa

SEQ ID NO: 10326 - DNA, 240 bp, Glycine max
  Clone ID: 701103550H1
tgatctatcagaagtcactggaaaagagcaaatggatgctcagccaaccaagaaaggaagaggaaggaagcaataacttggccttttgctagacaagatggttttatgaatcacaggaccaactaaggttgagtagttacattttcccgacctaatgattacttcgtcagattcttatgatgagaggtttatatattgaagttttgaagtctcaatttctgatctctggcagtcttgagt

SEQ ID NO: 10327 - DNA, 239 bp, Glycine max
  Clone ID: 701103551H1
aatttttgtacacacacacagattcccctctttcgaatttcgatactttgatcagatccacaacacttcttcatccatgacgcttggttcttcaggatccagtgtcgtggttccaaggaacttcagattgctggaggagcttgataagggagaaaaaggaataggagatggcacagttagttatggaatggatgatggtgatgacatttacatgcgctcttggactggaaccattattg

SEQ ID NO: 10328 - DNA, 240 bp, Glycine max
  Clone ID: 701103552H1
ggggagtttgaagatgacgatgaagaagaagactatggtgctgggtatcttgttcagccagttggacagtctgatgctctcaatgctggaggagctgatgtggatggtggaaatgatgacgatggtgaagaggaggatgaagttgatgacgacgacgatgatcaggtgttgcctcctcctgactcttcccacaagaggaagagggatgatgaagaggacgtggacgacgatgacgatgtg

SEQ ID NO: 10329 - DNA, 240 bp, Glycine max
  Clone ID: 701103553H1
aaggaaggcactggagacactgccgagtgccgtaaaatgcagattttcgtccgcacggatcggactcacctcattgaggtgagtccggcccagaccgtcgccgatgtgaaggccgccgtcgaggcgctgcagggcctggaggctggcgagcagcgcattctgttcaacggtgtccagctggaggatggccaggtcctggctgcggctggcgtgagcgacgatagcacgctcatgtgcctg

SEQ ID NO: 10330 - DNA, 240 bp, Glycine max
  Clone ID: 701103554H1
ctattagctatagctagaagtccctccaatccctctttgtctttgtcgttttctagttccttccaaaataccaaccaaagcaaagacaatgagttgccaagcatggcccgaacccatagttcgagtccaatccttagctgaaagtggcctaagttcaatcccttcacgctacattaggccccactcccaaagaccctccaataccacttcttttccaactcctaaaccttttcaaactga

SEQ ID NO: 10331 - DNA, 241 bp, Glycine max
  Clone ID: 701103555H1
ccctcaccgaagaagaacgtcataagcaacaactccaatccatcagtgcatctctggcatcactgaccagagaaactggaccgaaactggtgaagggagacccagctaggaagtcagatacccagaaggttactcacgtgcaccatcatgtcagcactcccaccattgttgtcagcgacagttctttgaaatttacccatgtcctctacaatctctccccagctgaactttatgaacaagc

SEQ ID NO: 10332 - DNA, 238 bp, Glycine max
  Clone ID: 701103556H1
gctcttgggaagccttggtggcctcttctccaaaacttggaaaccaaagaagacacgtgcaataaccggccctgttattgttggagatgatccagtcaggagaaagggtaatcacttggagcaaagagagaagttgtcgctgacttctgcacccaaagggcagtccaagctacggtccccacctcaagaaccaacaaatgcatttgaaaaagttgaggttgagaaaaataagcaagat

SEQ ID NO: 10333 - DNA, 239 bp, Glycine max
  Clone ID: 701103557H1
gcaacggtgaaggtgaagaagaacgacctgttcaagctctgatggttcttaaatatgggggcgttcttacacatgctggcagaaagcaggctgaagaactaggaagatatttccgcaataatatgtatccagatgtctgcagctgcttttgccaaaggtcttcttgaccttgaagggcagctcacaccaatcctggtttcacttgttagtaaagactcctccatgttggatggtcttga

SEQ ID NO: 10334 - DNA, 236 bp, Glycine max
  Clone ID: 701103558H1
cggctcgagctcgagcgaatcggctcgagacctttttggatggcattccattgcactgagaagccagaactggcagaaatcatataaccttcttgaacgaacacagaaaagtaggaaaaaagaactgagactagttctttataaattgactgcagctatgagttccactaaaactgctatactcattaaatcgagcattatgacagttaacaatgaagctaggtctttataagttg

SEQ ID NO: 10335 - DNA, 240 bp, Glycine max
  Clone ID: 701103559H1
ggctatctaaggttccggagggtgtagacaacaacaggggcaatgtttacattggcagtacaagcccgacaaatgttgcaagagcttactatgagcaatttcaaagagatttctctctttttctcaagtgtcgtgcagaggaattagttaaaggaggtcgtatggttctaacatttttgggaagaagaagcgatgatccctctagcaaagatggtggctacgtttgggagcttatggcta

SEQ ID NO: 10336 - DNA, 240 bp, Glycine max
  Clone ID: 701103560H1
gtttttcgttcccttcacaaaactcagaaccctaactatatccatggcatcgggtggaacagaagcttttccagatttgggtaaacactgccagcaccgcgattgcaaccagctcgattttcttcctttcacctgcgacggttgccaacagatcttttgtttggaacacagatcctacaagtcccacgcgtgcctgaaatccgaccacaacagcagaaaggttgttgtttgcgaacatgt

SEQ ID NO: 10337 - DNA, 238 bp, Glycine max
  Clone ID: 701103561H1
tttgaattggttgtgaagatgtatccacaaggacggatgtctcatcactttagggagatacgtgaaggtgattacatggctgtgaagggaccaaagggacgttttaagtaccagcccaaccaagtaagagctttgggtatgattgctggtggcactggcatcaccccaatgtttcaagttacaagagctatattagaaaaccaacaggacaaaaccaacataaatttgatatatgcca

SEQ ID NO: 10338 - DNA, 116 bp, Glycine max
  Clone ID: 701103562H1
gcacaagcacaagcagcaatgttgtataactccatctcatcgtcattgtcattgtcactgtatgtagatcactcagccacttgagataatcttagatattcctgtacgtcatcgta

SEQ ID NO: 10339 - DNA, 241 bp, Glycine max
  Clone ID: 701103563H1
cgtgaagcatattgatgctcttactgacaggattggaaggaatgttgtccttgaacttgttagcactgagattgatccaaagaccaaatctgcaaagaaaagtaatgaagcagtgctgaaggattggtcaaagaagtccaatcttaaggcagagagagttaattacacggctgaattcataattgactctagttttggggagccaggagctattactgtgacaaacaaacaccagaaagag

SEQ ID NO: 10340 - DNA, 244 bp, Glycine max
  Clone ID: 701103564H1
gctcttgggaagccttggtggcctcttctccaaaacttggaaaccaaagaagacacgtgcaataaccggccctgttattgttggagatgatccagtcaggagaaagggtaatcacttggagcaaagagagaagttggggctgacttctgcacccaaagggcagtccaagctacggtccccacctcaagaaccaacaaatgcatttgaaaaagttgaggttgagaaaaataagcaagatgatgca

SEQ ID NO: 10341 - DNA, 243 bp, Glycine max
  Clone ID: 701103565H1
cggctcgaggataaactaagtttcctgaatagagcctgtgttatcaaagatcgggaacaagaaatagcctcggatggttcagcatcaaatccatggaaactctgcacagtagatcaagtagaggaactaaaagccattattaaagtgattcccttgtggtctacagggatcatgatgtcagttaacattggaggctcatttggattgctgcaagctaagtccctggacagacacatcacctca

SEQ ID NO: 10342 - DNA, 233 bp, Glycine max
  Clone ID: 701103566H1
gctcaaatgaatcaggggattttttctatcacgtcagcactcttaactttggagacccttttaggaagcatgagatgcactgcaggttcaagcagaagccaccatggccatgggtggcaataactacttctattggtatccttgttattgcactccttgttggatatattttccatgccactgtgaatcgaattgccaaagtagaagatgattaccgtgagatgatggaactt

SEQ ID NO: 10343 - DNA, 234 bp, Glycine max
  Clone ID: 701103567H1
gctgagaaatgactccccagtggtggccaagacatcaattgcaaaggcagtgggtgattggttttatgatcgaaggcccttccgtgagatagattgtgcctacccttgcaaccctacttgccataatcgtatttttgatcagaatgagcgtccagacgtatagattcatttaaaagagtatgcttatttatttattactacaaactatactttattagttatctggtttttatt

SEQ ID NO: 10344 - DNA, 239 bp, Glycine max
  Clone ID: 701103568H1
gtgaatgggaatgtcctcagtgtgatttctataactatgggaggaatatgacttgcttaaggtgtgattgcaagcgacctggacaaatatctctgggtgccaccaataccatgccaaatatggggtacgaaaatggaaacaatcctaatacttcagacattgatgctaggttagctgctaatgaagaaaaagcacaacgttggtttagcaaggtttctcaactagacagcagtgctgat

SEQ ID NO: 10345 - DNA, 238 bp, Glycine max
  Clone ID: 701103569H1
ggaacattgacttggtgtatggtgggggaagtgttgggctgatgggcctaatatcccagagaatgtatgatggaggctgccatgttctaggggttattccaaaagctctcatgcctcttgagatatctggtgaaccagttggtgaagtaagaattgtttcagatatgcatgagcgtaaagctgcaatggctcaagaagctgatgcatttatcgccctccctggaggatatggaactat

SEQ ID NO: 10346 - DNA, 237 bp, Glycine max
  Clone ID: 701103570H1
agaaagtgtgccttggttatccttgcctttcaaggacaaaatctgtgggaagctagctcggtacttcgagctttcaaccctccccactttggttattattggaccagatgggaaaactcttcattctaatgttgctgaggcaattgaggatcatggggttgctgcatacccattcacccctgaaaagtttgctgagcttgatgaaatactgaaggccaaagaggcagctcaaaccct

SEQ ID NO: 10347 - DNA, 239 bp, Glycine max
  Clone ID: 701103571H1
aaaaaattgccagattccggccacaaattttctcgtttctctctgtctcctatcatatcgtcttcactctagcgtgccccatccgttccgtgtcaatttaccaatttacccctatatttttccaatttacttttttcacccgaagatataagataattaccgtttcgtgtaattttatcttttaaaagaaaagaggaagtatagtagtgacgtggcatgcggatagagagccatgaata

SEQ ID NO: 10348 - DNA, 238 bp, Glycine max
  Clone ID: 701103572H1
ctgaatctgtgatatatcattcgagctttgaatgcttctccctccataacaacaacaacgctctcttaatctttcttttttcatttccaatgctgcaacaacttgcaaggttcatatgcagcactacgacagacccaattgaattcccacaaaagaattaaagaaaaaacggtcaagttagaatcttttgaacctttcgatcgcgtgggaaggaagagaggaagatgggtgcgtacag

SEQ ID NO: 10349 - DNA, 238 bp, Glycine max
  Clone ID: 701103573H1
caattttcatttttctctctcccttagtcaaagggattcatcgttcttcttcccaggttatttagaaaagcaaaatggtgaagatttgctgcattggtgctggatatgtggggggtcctactatggcagtcattgcacttaagtgcccatccattgaagtcgctgttgttgatatctctaaatcccgcattgcagcctggaacagcgaccagcttcctatctatgaacctggccttga

SEQ ID NO: 10350 - DNA, 237 bp, Glycine max
  Clone ID: 701103574H1
aggagatctgcaaatacctcttccaagagggagtttgctttgcgaagaaggacttcaatttggcgaacaccctgagattgacgtgccgaatctgcaggtgattaagctgatgcagagtttcaagtctcgcgagtatgtgagggagacttttgcttggatgcactattactggttcctcaccaacgatggaatcgagtttctcagaacttaccttaaccttccttccgaaattgtccc

SEQ ID NO: 10351 - DNA, 235 bp, Glycine max
  Clone ID: 701103575H1
tttgtgatgctgtagataagtaccgtgctgcaatgttggttgtgggtagtcatggttatggggctataaaaagggcggttttaggtagtgtcagtgactattgtgctcatcatgctcactgcactgtgatgatcgtgaagaagccaaaaatcaaacactgatctgtaatggctgcgtctatatagtacaacaataaacataatcctttcagccaaagaagagagaaagaaaataa

SEQ ID NO: 10352 - DNA, 238 bp, Glycine max
  Clone ID: 701103576H1
gtcttcttggctctctgtttagggttgagtatgaagttgaatattgcagcactggccaaaagaatggtaatggctgtcttgatgggaagagaacaagcctcccaatacaaaagggtggttatgtcatatatggggttgctcatcagcattcaggtggcactggatcaactctatatggacaggatggaagggttatatgttcctcaataccgagttatggaaagggaaaggaagcagg

SEQ ID NO: 10353 - DNA, 239 bp, Glycine max
  Clone ID: 701103577H1
ccgctcgagcggctcgagcaaagagagaaaccacgacacaacacaaaacctccttagacttggtgtattttgtacttctgtctgtgttgttccttcacaaccacagagtcaaaaacaaaaacatctaaaacctctttctttctctgtgtttgtgtttttagtttttgtttttgtcctatgaaactcccaacaacgtttgcagacccggaatccttgtcttacctttacaccttgctcca

SEQ ID NO: 10354 - DNA, 239 bp, Glycine max
  Clone ID: 701103578H1
gatcactatttgaatgttccatttgatctatccaaggtagtttttgtggctacagcaaataggttgcaacccattcctccaccacttcgtgatagaatggaagtaattgagcttcctggatatacacctgaggaaaagctccaaattgccatgcggcatttgattccaagagttttagaccagcatggattgagttctgagtttcttcagattcctgaggcaatggtgaagcttgttat

SEQ ID NO: 10355 - DNA, 239 bp, Glycine max
  Clone ID: 701103579H1
gcataatgcaatggcaaaatatttgccattcgatataatacagaaataaatgttctttaaggatggtgaattggtgactatcgtccaagtaacaccatattcacttatccgcattggattcgaatagctttttttatccttttttttaggcctggcttattaaggtgtatgtagtatgtaccttggtccatctgagacacagtgcatgtaagaccatcactattgtgttaccccacaat

SEQ ID NO: 10356 - DNA, 242 bp, Glycine max
  Clone ID: 701103580H1
ttggaggagataacgtcattagccggcaagggaatatcccaaagccaaaacacctctgcttatgctcacactcataaccagcaagtgaatcatccttcctttgttcctaatatctcccctcaagcaccgtccagaccacttgtttgtgatctgccaattgctaggaaagcttcacttcatcggttcctttctaagagaaaagatagaattgctgccaaagcaccctatcaaataaacaatcc

SEQ ID NO: 10357 - DNA, 241 bp, Glycine max
  Clone ID: 701103581H1
ctactaacccgacctcccgaacagcagcacaaatctccgcgaggcatctcagcccagaggtttggtcccacgacgctgaacgttcgcccttttccattccttcgtcgacactccggttccggcacgaagaaatcaccatgtcctccttcgagcaggtggtcgtcatcgacggcaagggccatctccttggccgtctggcctccatcgtggccaagcagctcctcaacggccagaagatcgt

SEQ ID NO: 10358 - DNA, 238 bp, Glycine max
  Clone ID: 701103583H1
ctcgagccgctctgatctcactcaccattcaccaacctgcttctctgttctcttctttccctccccaagaagaagaagaagaagatgccttcttcagaatcatcaacaggcttctccgaaaccatttgtgtgaccggcgctggtggcttcatcgcctcttggatggtcaaactcctcttggagaaaggctacactgtccgaggaaccctcagaaacccagatgatcccaagaacgggc

SEQ ID NO: 10359 - DNA, 239 bp, Glycine max
  Clone ID: 701103584H1
aaaaccaaatcccagccaacatgaccaaggtgtttagagattccttcgctcggtgggcccaggcctctggggttttgaatctcaccgagacaacctacgacaacgccgacatccaagtagggttctacaacttcacttacttaggaattgatatcgaggtgtatggtggcagccttatatttttgcaacccgattctaccaagaaaggggttatacttctcgacggtaccaataagttg

SEQ ID NO: 10360 - DNA, 237 bp, Glycine max
  Clone ID: 701103585H1
cttcttcgcaatctcagaacagaacacaacagagcccttcaactctctctgtcgttgatggcgtcacaagcgagcctccttcttcagaagcagctcaaagatctttgcaaaaaccccgtcgatggcttttctgccggtttggtcgacgaaaccaacatttttgaatggagtgtaactataattggacctcccgatactctttatgaggggggatttttcaatgccattatgagcttt

SEQ ID NO: 10361 - DNA, 236 bp, Glycine max
  Clone ID: 701103586H1
gaattgctcgtgcgcgtgcgtgcgtgatcgtttgattgtttggatcttgttctcgatcgacgacgatgtcggagatggcgagcccagatcccgagggactcgacggagtccggatgacgtggaacgtgtggccgcggacgaaggtggaatcaagcaagtgcgtgatccctctggcggcgacggtggctctgatccgtccccaccctgacatcccccgcctcccgtacgcccctctc

SEQ ID NO: 10362 - DNA, 234 bp, Glycine max
  Clone ID: 701103587H1
gaatccgccagcgtccatggggaaagtgggctgctgagattcgcgacccaagaaagggggttcgtgtttggcttggaactttcagcactgctgaagaagctgcaagagcttacgatgctgaagcaaggaggatccgtggcaagaaagccaaggtgaatttccctgatgagccttcaggcgctgcttcctcaaaacgtctcaaggcgaatccagaggctcagccaatgaagaaaa

SEQ ID NO: 10363 - DNA, 239 bp, Glycine max
  Clone ID: 701103588H1
ccctagttcgcttgcagtcacacaagaggccaatcctattcatagctcgagatgggtgaagaagtgaaggtagttgttccagaatcagtgttgaagaagcgcaagagggaggaggaatgggcgttggccaagaagcaagaactcgatgctgccaagaagaagagagccgagagccgcaaactcatctacaacagagctaagcagtacgctaaggagtacgatcaccaggagaaggaatt

SEQ ID NO: 10364 - DNA, 236 bp, Glycine max
  Clone ID: 701103589H1
gaaggaagtcttacctttctgtcagcaaagttcgatggaatactgggacttggatttcaggagatctcagttgaaaatgctgtgcccgtatggttcaaaatggtggagcaaaaacttatcagtgagaaggtgttctctttttggcttaatggggatccgaatgcgaaaaaaggtggtgaattagtttttggtggtgttgacccaaagcacttcaaaggaaaccacacttatgttcc

SEQ ID NO: 10365 - DNA, 237 bp, Glycine max
  Clone ID: 701103590H1
gcagattacatacgttatcgtaaaatcacttcaaatatgaacgatcggtttccagatgcaacccctgaagagcttaatgcaagtgatgcaacctgcattatttgtcgtgaagagatgacgacagccaagaaacttatatgtggacatctttttcatgttcattgtctccgatcatggctggagcggcagcacacttgccccacctgcagagccttggttgtaccacctgaaaatggg

SEQ ID NO: 10366 - DNA, 238 bp, Glycine max
  Clone ID: 701103591H1
aatttctcgatcataaattaattacaaaaataacataggttgtcgcaacatggagattcacgaaaaccaacacgagtcatggtcggaaacggagagcacgggaagccggagcaggagagtgggcttcagtgggcctctgagcggaccactgagcgggcctttgagtgggcctttggtttcttctaacaaaagaaacagcagcaagaacaaaagtgcgaggttcaaggacgacgaggag

SEQ ID NO: 10367 - DNA, 234 bp, Glycine max
  Clone ID: 701103592H1
tttctatttctaaaacagcgtttgcttttgtgtttggtcttagacgcagcacgcccccaccactgtttcaaccctcaaattgtgtcttcttcgctttctggttttgattaggttttgttccatttgaaacaatattcatcgatccatcgccaaacatgccttctagtcacttgcttcttgaggaacctattaggatggtctccatccttgaaccatccaagcctagttttttct

SEQ ID NO: 10368 - DNA, 237 bp, Glycine max
  Clone ID: 701103593H1
ccggcggcaccctccgaagacggagatacacccactcactcaccaccactttcccagaaaataaccaccgcctacaatttctcggaatttattttgcggtgagggagctcgtgtcgtgtgtcgtttagggttaaaaatggggtttaagtgggtgcactgatgtcattgttgtggcttgtgattcgtcaacttgcagaaatcgaggcaatggctgcatctaagaaactgataacaaga

SEQ ID NO: 10369 - DNA, 236 bp, Glycine max
  Clone ID: 701103594H1
ccggactgggccagttcagctgccatacactttgctccatcgttcaagtgaggaagggttgactttcaaaggaattcccaacagtatctctatctaattaaaaagagtttgtggtttccttatctatgttgtacttctgaataacatagactttatgcatgtctatgcgtaattattgcctgaacttctgcactattgtatttggatgctctcggttttcatataataaagtgtgt

SEQ ID NO: 10370 - DNA, 232 bp, Glycine max
  Clone ID: 701103595H1
ctcgagccgctcgagccgattcggctcgagcacagacacggaaagggaaagagaaaacacaaccagaaacacaacattacttctttgaacttgatgtgtcttgtagcaaatgtccttccgcagtattgttcgtgatgttagggacggatttggaagcttatcaaggcggagttttgatgtaaggctttctggtgggggcaagttgaatagtttggtccatgatgtgcacgaa

SEQ ID NO: 10371 - DNA, 241 bp, Glycine max
  Clone ID: 701103596H1
gtttcttggttggaaaggggcatcagggttctcagcctcttccacagccgaacaagtcactcaagggattgatggaaccgccctcaccgccatcgtcacaggagcaacaagtggccttggtctggagaccacccgggttcttgcattgcgcggtgtccatgttgttatggcagtaaggagtctggacagtggtaagaatgtcaaagaaacaatacttaaggaaatcccctcggctaaaatt

SEQ ID NO: 10372 - DNA, 269 bp, Glycine max
  Clone ID: 701103601H1
atttgaagattaaagaataatgggttgttacagagttcagcttgtggcaataatctcgttcatgcttttgctttcaaatacccacggttggggagatgatgggcatgccattgtttgtaagatagctcaggctcgcctcagcacgcagctgcaaaggctgtgaagaaattgttgcccaaatctgccaataatgacttggcgagcaagtgctcttgggcagatagtctgagggttgtcttcccttggtcttctgctttgcactttgctaa

SEQ ID NO: 10373 - DNA, 267 bp, Glycine max
  Clone ID: 701103602H1
actgcattccgcttcagctcgtcgggctcgagggcaagaaggcctacattgttgtctctggaggcaattactgcccttgtgaagatgctgcaagagctctcaaatggcctgcattggtctgcaaagaacgccggtttaagattttgacttggccattgaagcactttctggggtgtcagattctgaggcaccagtgatacatgcagtgtacaccagcttgaagggtttgatcaaaattcacaatcccagtgtagtgatcagtctggc

SEQ ID NO: 10374 - DNA, 255 bp, Glycine max
  Clone ID: 701103603H1
ttcgacgatcgcagatcgtatatgaacaggcattcttgagattaattgcttgagtctgagataagtccaggtactgcatttctttgggttaattatacaagatatttttagttctgggtacctgttcctacaaagactatacttataaatatcttcaaaaactgggaattgaagtaaagatggtggccacgtcatgcttgaatttgttggatttggtatcaggggatatgctaaatttccctcagacccccagat

SEQ ID NO: 10375 - DNA, 217 bp, Glycine max
  Clone ID: 701103604H1
aactactactactactgcacacactctctctctctctctcattgtatggccgccaattcgagtagccgagggatcaccgccttggggaagcgagtcgccaaccagatctggacttccaaccccccctcagctcctctcattccaggaggggagcaatagcagctgcatacagtagcagcggcgggtcagtgtatgacaagaaccctgatgatcagat

SEQ ID NO: 10376 - DNA, 260 bp, Glycine max
  Clone ID: 701103605H1
cttttcgctctctcattcaaaccattcgatctcatcatcgccaacatctcctcaaactgtaagtatacctacaaatcactgtaaatctccattaccactctcttagttattaacttagaatcttccctttctagttctaattataatcattctttttttatatttccccccccccatatgggtatatatatgattgggatctatacatgttagatgagtcagagatacattaatagtccaaggtagtttcattttctggg

SEQ ID NO: 10377 - DNA, 259 bp, Glycine max
  Clone ID: 701103606H1
ctcgagccgctcgagccgattcggctcgagggtcctttgggaagtttcaattggtttgacactcatgatcattcaatgagccgaacaaactcatacattagcggggataataagggtgcagctgcacgatttatggaagctggtttgagcgaaaagggtctgtaagaatggattcggttggatttgaaaatgatggaatcccccgaagaatttcaaacataattcccagccttcatgataatcaccatgaattactgga

SEQ ID NO: 10378 - DNA, 258 bp, Glycine max
  Clone ID: 701103607H1
ctgcaatctaaggtagaaataacaaacacaacatgggttctttgggcacaatcaacaagccacatgctgtgtgcataccgtacccagcacaaggccacataaacccaatgctaaaactagcaaaactccttcacttcaaagctttcacataacctttgtaaacactgagtataaccacaaacgccttctcaaagcaagaggccctgattcccttaatggactctctacatgtcgctttgagaccatacctgatggact

SEQ ID NO: 10379 - DNA, 156 bp, Glycine max
  Clone ID: 701103609H1
aactagaactatattagagtttagtttgaactgttcgtgatcaggtgacctgtcaatcaatcctcttgtttatgttggattttatagtaaaaacctgaatttggatattccttttttttccactctaattttcaaaatgaatcactttgtattgaa

SEQ ID NO: 10380 - DNA, 263 bp, Glycine max
  Clone ID: 701103610H1
atttcgtcaattccaacaacaccacaatgggaagaagaccggcgaggtgttaccggcagataaagaacaaaccgtacccgaaatcccgtttctgccgcggcgtgccggagccgaagatccgaatctacgacgtgggaatgaaaagaaaggcgtggacgagttcccgttctgcgtgcacctggtctcgtgggagaaggagaacgtctccagcgaggctttggaggcggcgcgcatcgcatgcaacaagtacatggccaagttcg

SEQ ID NO: 10381 - DNA, 267 bp, Glycine max
  Clone ID: 701103611H1
attccattctctctgtgtatttccctacctctcccttcaagatgcagatcttcgtcaagaccctcaccggcaagaccatcacccttgaggtggaaagctctgacaccatcgacaacgtcaaggccaagatccaggacaaggaggaatccccccggaccagcaacgtctcattttcgccggaaagcaacttgaggacggccgtacccttgctgactacaacattcagaaggagagtactcttcacctcgtcctccgtctccgtggtgg

SEQ ID NO: 10382 - DNA, 265 bp, Glycine max
  Clone ID: 701103612H1
atctgcttcaatggggaagggaacagggagcttcgctaagaggaggaacaagacccacactctctgtgtgaggtgtggccgccgcagcttccacctccagaagagtcgctgcgccgcttgtgctttccccgctgcacgcacgcggaaatataactggagcgtcaaggcaattcgcagaaagaccaccggaactggcaggatgagatacttgcgtaacgtgcctcgccgtttcaagagtggcttcagagaaggtaccgaagctgca

SEQ ID NO: 10383 - DNA, 267 bp, Glycine max
  Clone ID: 701103613H1
ctcgagccgcaagtctcctcctcctcctgttcattcaccacctacaccacactacatctatgcatcccctcctcctccatatcactactagatagtggttttgcttagcttcccgagtagttattaatgaagaatataagccataaagaacgttgttgatagcaggaagatgcacttcgcaattacacaaggaaaacaacggaagcaaagtttccgcgcattttgtcacataagaagaaagaagtgtccatccttttcttcttcgtt

SEQ ID NO: 10384 - DNA, 268 bp, Glycine max
  Clone ID: 701103614H1
cacgtctttctctctccaccatgcaccaagccattccctaccgaacctccatcctgaccggcacatgtgacatggcacacgccggaggaatcaaagaattcaacctcgccaatccatccaacgttgccgcaatggtttcggaagcgcagtggtaatcattgggaaacgggggtgctgcatgtgccacgtggtcaaaaggttgttgcaaggtctgggagtgaaccctcccgtgtacgaggtcgacgaggaccacgaagccgccgttgct

SEQ ID NO: 10385 - DNA, 270 bp, Glycine max
  Clone ID: 701103616H1
cccaaccctatccctcttctcagattcattccatcatggctctctccaaagccaccttcttgacgcacctcagaaccctctccaattctcaccgccgcccttcctcgtgcgtttcaatccgcctcctctccttctcctccccggggaggccgcggcggacgccgccgaagaaagcgccactccgcatggaaccgcccctctccgccctgaaccgcacccaaaccgctccaaagcccctacaatcaccctattatctaaaccctaacaacc

SEQ ID NO: 10386 - DNA, 200 bp, Glycine max
  Clone ID: 701103617H1
gcgctgattgtgagtggaaggcccaagcagggaacatttgtgttgcatcatttgattggagctgcagtggaatttgcaggtctgctgagaggattaaagaggtacataggaggtgtcgagagggtgagaatgcttgtggagtgccgctttctagggggcaaaaaagtgagagcggagttcgtcctaactcaggacgatta

SEQ ID NO: 10387 - DNA, 264 bp, Glycine max
  Clone ID: 701103618H1
cccaaatcaaccaccctcttccgtcgccagccagctccaatgtccccgacggctccgaggttctcaacactccggcgtctcccaattcttcgtctatttcatcatcgtccaacgaagcagcagccgccaccaccgccaacaaacaacgggaaatgataatgaagaggaggaagatgaaacagcaatagatgcaacagcaggcagagaagaagaagatcatcaagaccaagacaagactaagaaacagctcaagccataaaagaa

SEQ ID NO: 10388 - DNA, 228 bp, Glycine max
  Clone ID: 701103619H1
gccaaagagaagagtgcgaaacaagaagaagaaaatttctcatttctcgttctgaaaatcggagttcaacgctattattatatttgtggtatcttctatctgattcagcatcatggttcagctaatgaggtctgataggataatcactgtctgacaaacgtgaagttggaggttcaagatgaaatcccccctcttcacactcacaagcgacccaaattggaatctccc

SEQ ID NO: 10389 - DNA, 248 bp, Glycine max
  Clone ID: 701103620H1
ggcggctgaggactgctacgccgtggaaaggatctggaagcttctcgcggaggtggaggacctccacctgatgatggatccggacgatttcttgagactgaagaatcagctctcggtgaaatcctccggcggcgaacggcttcgttctgcttcaggtcgaaggagttggttgaactgacgaagatgtgcagagatctgaggcacaaggtgccggagatattggaggtggaggtggatccgaaggagga

SEQ ID NO: 10390 - DNA, 257 bp, Glycine max
  Clone ID: 701103621H1
gagcagatgaaattaaagaagcagcaccgaaaccggatgaccagtaaaaatattttactgctaattagaattgaacttctcctccatatctttttgaagggagaaggtgtttgttgctaatatctctttggtactggattttaggcattcatgtctgttatgaattgtggatgtactgggccgttttagtttgtccttccattttctcaagtgttttccaaattgcctattttattaaggacactgaagtttttatt

SEQ ID NO: 10391 - DNA, 254 bp, Glycine max
  Clone ID: 701103622H1
gattacttgagtgaagaagaactcaatcactctgaattatggtgcataaagctgactgcgtttatgatattatctgctactatgtctggcattgtttgaactttcactcgcagcggcttattcgtgtgatcttagttctctactctcattccaagcgtgggtgtatatcaaggtggcgtgatatgccatggtcgctagacctgttacagagctgatatctataccggcgacactaatggtgtcaaactcggaga

SEQ ID NO: 10392 - DNA, 260 bp, Glycine max
  Clone ID: 701103624H1
cctcgagccgattcggctcgaggattagagtagtagtttgtgttgacgattgacgacgacgataacgacaacgacgaagcatcatgtcttccggcggcggcggaggcggagcaaagccgttcttctgccacgtgtgcagtcaaggatcacgtgctccgatgagtcggaacccttctgcccgatctgtatggaaagtttcgtagaagaatgcaaccctaacaaccctaaccctaatcttttcaccgagaatgaggatcttc

SEQ ID NO: 10393 - DNA, 265 bp, Glycine max
  Clone ID: 701103625H1
gccatcctggtgggggctggttaccttgctttgggttacttcattggttctcagtatccccctcgtttcctcttctcacataaattatcgactaaacataaagaagatgcttcacttctcaatgacaacgacaataagaagaggaatactaagtccaaactcaaagaccccctggagattgaacaactcgctgaaatcctcgatgattttaagatgatactcgttgtcaggaatgatcttaaaatgggtaaagggaagattgctg

SEQ ID NO: 10394 - DNA, 90 bp, Glycine max
  Clone ID: 701103626H1
ctcactttctctatcttcaaccagccagaaaaaaaaaaaaaccccgcaaccaacccctatttctccgaatttgggttccttccgggaagg

SEQ ID NO: 10395 - DNA, 261 bp, Glycine max
  Clone ID: 701103627H1
gaaaaatggtgctagaacaagcagtatcatcatcaagcaccttgaggaacgttttcaccaatcccaaaaccctaatttcaaaaccccaattccaagtcgccgcttccccttcatggaaaccacagcagccgcgctgggaaggtggctggggataaacttgaagtgctccatgacaacaacaacaacgccatcatcataccctaagccctcggagattccgtggcagaaggaactctgcaactccgtcaacctcatcggcaa

SEQ ID NO: 10396 - DNA, 262 bp, Glycine max
  Clone ID: 701103628H1
gttttattaggattttctcttctttgttttcaattaggtttttttgttgctctccttcaaactccatctttccaaatcctctctttgcgattgtgttttgatctgcttcctactgcgatagtttctctactgttacatgccatggcggtttccgcaattggttttgaaggtttcgagaaaaggttggaaatatcctttttccagccgggactttttgctgaccctgaaggaaggggtctaagggctcttacaaaatcccagt

SEQ ID NO: 10397 - DNA, 265 bp, Glycine max
  Clone ID: 701103629H1
cttgaatattcattgtcaaaggttgtttttgtgagatagaaagaagagaggaagagcaagttaagcaatcaatcatatcaaggaagcaattatggaaggtttgatcccatatcttattcatgcaatcaagaagcaaaagctcatcaccacaactacaggagctactctcattctgaaagctcaaaccgcagctaccacatgctattggcgtctgaatccttcacaggatcttctcacagaagaacaaggtctgattttcagcccc

SEQ ID NO: 10398 - DNA, 265 bp, Glycine max
  Clone ID: 701103630H1
gatggatactatatccatggacaatgtgctattatcatgtttgatgttactgcccggctaacatacaaaaatgttcccacctggcaccgtgatctttgcagggtctgtgagaacatcccaattgttctttgcggtaacaagttgatgtcaagaacaggcaagttaaggcaaagcaggttacattccacaggaagaagaatttgcagtactatgagatttcagctaagagcaacgacaactttgaaaagccattcttatatttggc

SEQ ID NO: 10399 - DNA, 261 bp, Glycine max
  Clone ID: 701103631H1
gccccatatcacaaaccacattaaaaaaagactaccacgtattcttctctctccgtctctctctctctctctctctcttcacagtgccaatggcggatccaatcgcgaaggttctgatcgcgtttgcgctctctacgttccctcttgctgtgttcgcacgcttcctccgacgttcccttcatcgttgctcacaagaaggcctccctcaacagactcaagtccggcgccgaaagggtctccgtcaccatcgacatcttcaac

SEQ ID NO: 10400 - DNA, 267 bp, Glycine max
  Clone ID: 701103632H1
gaaggcaagatgtcgaagagaggacgcggtggttcggcggggaacaagttccggatgtcgctgggtctgccggtggcggcgacggtgaactgcgccgacaatacgggggcgaagaacctctacatcatatcggtgaaagggtcaaagggcgtttgaaccgtctcccctcggcttgcgttggcgacatggtgatggccaccgtgaagaaggggaaacccgatctgaggaagaaggttttgccagctgtcattgttcgccagcgcaacc

SEQ ID NO: 10401 - DNA, 257 bp, Glycine max
  Clone ID: 701103634H1
catcttttgtgttcttctttgtttctcacctttctgaggatttttccatcttagttcctggaggcaccaggaacctgaccaaataaataaaccttttttttcttctaatttttctgaagtttcattttttagtccaaggcaacttggatattatcagaatgtggcttgaagcctcttgctccagtaattcctagacctagaactggggctgctttgtccagcacctcaagggttgaatttttggacacaaacaaggt

SEQ ID NO: 10402 - DNA, 251 bp, Glycine max
  Clone ID: 701103635H1
cgaatatcttgttgtttggagcgatccgagaaaaactctgtaaacatgttggtttaccaggacctccttacaggtgatgagcttctctctgactccttccgttacaaggaaattgagaatggaatgctgtgggaattgaggggaagtgggatgttaaaggagcagttgatgtagacattggtgcaaacccttctgctgagggtggaggagaagatgagggagttgatgatgcagctgttaaggttgttgac

SEQ ID NO: 10403 - DNA, 205 bp, Glycine max
  Clone ID: 701103636H1
gagtgcatgtgtcataagtgtagatctctaactaacatattatgtctagtcgagtcttgcttttgattaactcctgcatagatgtttctacccaaaaatgaaaaaaaaaagaagcttttataggtttttggtttctcatccaggtcacttttgtttctggtcgtttttttaatttctcaatttcaaaaaaatacccttttaagtc

SEQ ID NO: 10404 - DNA, 254 bp, Glycine max
  Clone ID: 701103637H1
ttgtgtttttctgatcccttatcttaattaatttaatcaccaatggctcgttctatcgctaacgccaagactttctccgctctcgtgctagacggattctccaacactctcaccagacgtggctactctcaaagcgcaacaaggggaggagttgcctccatagcacccaaatcaggggaagacaaaggtgtctcatcatacaaggtttcctgggtgccagatcccgtcaccggttactacaaaccggaaaacat

SEQ ID NO: 10405 - DNA, 253 bp, Glycine max
  Clone ID: 701103638H1
cttctcataagctctacttagcaaatcaaaatggcactttcttcttcatcttcaacatccatatttgctttagctttgttcactactcttttgcttataggaagttcttcagctcaactctctgagaacttctagatagtaaatgtcccaaggttttctatgccgtaaaatccgttcttcaatctgctttggctaaagaacctcgccagggagcatctatcgttcgcctcttctttcatgactgctttgtcaa

SEQ ID NO: 10406 - DNA, 254 bp, Glycine max
  Clone ID: 701103639H1
gttatgacaaggctcattttgattatggtttggaggaagctgattaggaaccccaacacatattccagcctctttggtctcacttggtctttgatctcattcaaatggaatgttgttatgccagcaattgttgctaatcgatatcaattttatctgatgctggtctagggatggcaatgtttagccttgggttattcatggcattgcagccaaagattattgcgtgtggaaactcggttgcttcctttgctatg

SEQ ID NO: 10407 - DNA, 261 bp, Glycine max
  Clone ID: 701103640H1
tgatgatcctgagtctgtgcagcgatctgttggaggcctcacagaacataggacaaagactagaaaaacttgcagaggcacttggtttgccattcgagtttcgagcagtggcatcaaggacttccattgtcaccccatcaatgctcgactgtagtcctgatgaagcacttgtggtgaactttgcattccagcttcatcacatgcccgacgagagtgtttcaacagcaaacgaacgggaccaacttcttcgcttggtgaaga

SEQ ID NO: 10408 - DNA, 261 bp, Glycine max
  Clone ID: 701103641H1
ctcttctaacatggcgactcacatcctctctcgcatcttccccaaaaccctagcccccttcctctcccgttctctctccaccgccccctctcctccctccctctccgcgctctccttcctccgctgcatctccgttgctccaacccctccctccaccgcgccctcctccccaactctccctccctccgcgccctctccacacgcgccactacctcctccctcaacgaccccacccctaactggtccaaccgtcccccgaaa

SEQ ID NO: 10409 - DNA, 253 bp, Glycine max
  Clone ID: 701103642H1
gttgtgatcaactacgttacttctctcttggttttcttcatcttccaccttcacctggtttacttccttcgataattaactttatcaaaatcaaactttgatgttcttgcttgtcttaattacttctctgtcgtttgagaatagtattacactattgtctgggaattttgttcctttcctcttttctgaattccgtttctctgaaaagaagtttatcataaacacgttggaatggcaaggaactacttcaaac

SEQ ID NO: 10410 - DNA, 260 bp, Glycine max
  Clone ID: 701103644H1
cgaaatcagaggacctaggttaaggttgcggtgctggtggtcgagttcacaggaagaggaagagataaaatttgaaagaggaagttgaattgaaggtataatggcgaggcgagagctttcaagcacgttgaagaacgaaagttcatgcaaagggcagctctgagggaggagagaaccaagaaagaagaagaggttaagcctgatgtcagtgttggcacatccactgcggttactagaaagtgtgtggttataatggaagg

SEQ ID NO: 10411 - DNA, 262 bp, Glycine max
  Clone ID: 701103645H1
ctaacgggtcccaatccgatgatcattccttcaattacatgaaattctgccgacccactttctctgatcgcgttccctgcatacccatttgcaagaatcgtgacactgccttcacacgcgtggaggagtttgacacatgtgtggaggataatgatgatattgaggttgaggttgtggagggtgttgatctttggttgaagattcaagaggaggcaaggttacatgttgatcaagaaccaattttatccagctactatttcag

SEQ ID NO: 10412 - DNA, 261 bp, Glycine max
  Clone ID: 701103646H1
gccatctccattccctttccctttaaacccattccctttcaacatcacaatgagttccacatacaaacatccatcatcattattattttactccgaacgagttgacaccgattccactcactcaaccatgcgccgatcaggcgttttgagctcatagaacaaccacctttcttccactcctgctactctttcccttccttcgtcctccaagactcactctctctcgacctcgacctcttgccacttcccagccacttcgac

SEQ ID NO: 10413 - DNA, 262 bp, Glycine max
  Clone ID: 701103647H1
atctccttcagatatgcgagagccaaagctggctgctaaaatagctaagcaacttcaaagatttcatcatggcgaaattccaggctcaaaggaacctcaattatggaatgatgtctggaagttctttgagaaagcatctgtcttgaatttgatgatagtaaaatgcagaagacttatgagacaatttcattcaaggaagtccacgatgaaattgttgagctcaagggattgtgtgatctactcaaatctcctgtaatttttg

SEQ ID NO: 10414 - DNA, 127 bp, Glycine max
  Clone ID: 701103648H1
ttaattggctgaatatgatgtcgacctcgacgaacgtggtagtcctggacaacggccgcaggctgatcaatgcggcatcggcggtctgagcgacccctccgtcatagtcccgaagtgactctaacgc

SEQ ID NO: 10415 - DNA, 258 bp, Glycine max
  Clone ID: 701103649H1
ttgacagcaaggagctccggtatgaccaagaaagtggatttcatgtcttggatgctttgccgaagaatgtggatgtggggacatatgtgtttgtttttgagattgtgcttcatgattttagcagtgaaaaagttttgcaactggaggccaaattcatgtaccaatatatgtcactggaattattgaagttggtaatgcagaaatcacagttcttgacagtgatcttggaagtgctgaaacccagaaaaagctagattt

SEQ ID NO: 10416 - DNA, 253 bp, Glycine max
  Clone ID: 701103650H1
aaagaaagaaagaaagaaaaccctagcttaccttttcaactttcaagatgcaaatctttgttaagacactcactggtaagacaatcacccttgaggtggagagttcagataccatagataatgtaaagtccaagatcaagacaaggaagggatcccaccagaccagcaacgtctcatttttgctggcaagcagcttgaggatggacgtacacttgctgattacaacattcaaaaggagtccactctacacttg

SEQ ID NO: 10417 - DNA, 247 bp, Glycine max
  Clone ID: 701103651H1
ttgctaactacttagactgaaggaaagagaagcatgagggtgttttctcggttcaaatttctgtcaagagcagtgcacgaggaacaagagggtgagcatgatggggagagaaacaggtaccctttaacagaacaagtttgtgcacgtccctaacgctaacagtttggagaaaatcccttgtgattagttgtaaaggattcactgtgatagattcatatggaaacttgtgtatcgggtggacattaca

SEQ ID NO: 10418 - DNA, 252 bp, Glycine max
  Clone ID: 701103652H1
cgtagaatcgaatcgagttcactttgatcgtgtgtgtctccgatcttcaaatccgcaacaaccatggtgaggggattgctcaacaagctcgtctctcgctccctctccgtcgccggaaaatggcagcacaacaactccgccgcctcaacatccacgagtaccagggcgctgaattgatgagcaaacacggagttaatgttccgagaggcgtggctgtttcctctgttgaagaggtcagacaggccatcaagg

SEQ ID NO: 10419 - DNA, 252 bp, Glycine max
  Clone ID: 701103653H1
ggcttctcctcttcttactccttacaagatgggcaaattcaatctgtcccatagagttgttttggcaccgctgaccagacagacgtcttacgacaacgtcccacaaccccatgccatcctctactactcccaagaacttccaacggaggccttctcattactgaagccactggcgtctctgacacggctcaaggctatccgcaaacccctggcatatggactaaagaccatgttcaagcttggaaacccatt

SEQ ID NO: 10420 - DNA, 249 bp, Glycine max
  Clone ID: 701103654H1
gtttctgtttttaagagcactgatttgtggtgtttttatttttattttatttttctgttatgctttagttctataaggagcactaacatgcttataattagtgtacttgctgttataaattccagtcttctattttctgccttttcatattttctcagtttgctttagctttgtctttctgtatatcaatacacactataaccatgcttctaaggctggaagaaggcgggactatgtcattagagaatg

SEQ ID NO: 10421 - DNA, 253 bp, Glycine max
  Clone ID: 701103655H1
ctttctctctcttcttgcttctctctcttcttgctcctctctccctttcaattactctctctaccaaggagtgatggctgtgcaactgtgggaaaccctgaaggaggccatcgtggcctacaccggcttctctcttccaccttcttcacggtgctggcgcttctttttgccgcttactacgtcgtcacgggtctttttggttcctccgacgaccaccaccaccgccaccgccacgcccaggaggaggagatgc

SEQ ID NO: 10422 - DNA, 255 bp, Glycine max
  Clone ID: 701103656H1
cttttcaatactctgtatgattttcttatttcaatatgatcctttgggtggtattgatcacaaaatgatattagtgttgttgctatatgttcccctgcaagagctgccactgtttatattagttttaatctgtacatgatgctgcttgccgagttattgcaagactataaaaggtacgagatgaagctaggtccttacttgcacaagcagagaggcagttccctgtttctgcaccaaatgccataacagctaatg

SEQ ID NO: 10423 - DNA, 253 bp, Glycine max
  Clone ID: 701103657H1
cacaagcctggaaaccgcccacaaactcgccatatgggtgttggacgtcgcatgaagattcaggggctccctgagccgctttcagaagagcactttgccaatctcaagcggtaaaagggcctgcccgtcgacgaactccgtccgaggtgcgctctagcaagaagcgtcgcacgtctgcgaagccgagaatcccgccagaaagctccgtgaggactcgggcaagactgctgtcgcatcgaagtcagcggggaaa

SEQ ID NO: 10424 - DNA, 255 bp, Glycine max
  Clone ID: 701103658H1
acatacattgtcaacacttcccacccatccagagagtgttcctattaatgcacttgttgctgtaaagggaacccctcttgaggatcagaagcctgttgaaatatgggagatgattcgcatgatagcaactgcactatcgtaatgccaaaagcaatggtcaggttatcagctggcagagttcgattctccatgcctgagcaggcattgtgctttcttgctggtgcaaattctatattcactggtgaaaagcttctc

SEQ ID NO: 10425 - DNA, 201 bp, Glycine max
  Clone ID: 701103659H1
acttgacatatctgctatcaccttttccgtttcttgcgattcgacgatggccgatcaaaagctttcagaaccggcgcttaaacgtgagcagcttgatgaattcgtgagtagtctatattttgaacaacgaattctgaactccgacttcttcaagacctcgagaacaatgatgaatgtaggaaaaatgggagcctgaaaagg

SEQ ID NO: 10426 - DNA, 255 bp, Glycine max
  Clone ID: 701103660H1
cggctcgagtcttctcttgcggctagggttttagcgcacttcttctagatttaaggaagatggctaaggaaaaggttcacatcagtattgtggtcattggccatgtcgactctgggaaatccactaccactggcacctgatttacaagcttggaggcattgacaagcgtgttattgagaggtttgagaaggaagctgctgagatgaacaagaggtctttcaagtatgcctgggtgctggacaaacttaaggctga

SEQ ID NO: 10427 - DNA, 260 bp, Glycine max
  Clone ID: 701103661H1
cgagatcaaccctgacccctaaggccaggggtttttctcggcttcttcagattcctgaaatggcgtctgtttcagctttagccaagtacaagctcgtcactcttgggtgaccaatccgtgggcaaaaccagcatcacactcgcttcatgtacgataaattcgataacacctatcaggctacaattggtattgattttctatcaaaaactatgtatctcgaagatcgaactgttcgactgcagttgtgggatacagctggc

SEQ ID NO: 10428 - DNA, 261 bp, Glycine max
  Clone ID: 701103662H1
atttgatggccacttaggccatgatgtagcaagctatttgcagaaccaccttttccaaaacatcttgcaacagcatgacttttggactgagacagaaagcgcagtgaaaaaagcttacgttgaaacagatgagaaatattggaacaagaacttgtgttggggcgaggagggtcaacagctgtgactgcaatacttattgatggtcagaagcttgtagtagcaaatgttggtgactcaagagctattatctgtgagaatgga

SEQ ID NO: 10429 - DNA, 262 bp, Glycine max
  Clone ID: 701103663H1
caacaatggcagataactcaattagcttattttctccatacaacaagatgggcaaattcaacctctctcatagggtggtattggctcccatgaccagatgcagagcgctcaatgggactccactggcagcacatgctaatactacgctcagagatcaacaccgggtggatttctcatcactgaaggcaccttgatctctccaacttcttctgggtttcctcatgttcctggaatatactcagatgaacaggtagaggcatgg

SEQ ID NO: 10430 - DNA, 263 bp, Glycine max
  Clone ID: 701103664H1
aatttaccagctatacttgttccttttgaaggttagaagtgctacaatacaaacaatggcagctactcaggaagatgtgaagcttttgggtattgtgggaagcccatttgtgtgcagggtccagattgcccttaagtgaagggagttgaatacaaatttttggaagaaaatttgggcaacaagagtgatttgcttctcaaatacaaccctgttcacaagaaggctccagtgtttgttcacaatgagaagcccatagcagagtc

SEQ ID NO: 10431 - DNA, 268 bp, Glycine max
  Clone ID: 701103665H1
cattcggctcgagttccggcacttgtcaggcagagaacgattggtcttacatgaagtgcttgctggagttggacatcaagaatggcaagcgccctatggagattgatgatgttgaggaggatgagccccaccagccaaggaagtgtctaagaagttggattcttgccatagagttgaaatggctcgaatttcgtttcaacgtcaatctattgaggccaaggattctgttgttccccctatggatcaggagaccattgagccactgagt

SEQ ID NO: 10432 - DNA, 254 bp, Glycine max
  Clone ID: 701103666H1
gtaatttgtgtctgctcactcgctcttctccgccacttctgaatctattgaatcaacaatcatgtcggacgaagagcaccatttcgagtccaaggccgacgccggagcctccaaaacctaccctcagcaagcggtaccatccgcaagaacggctacatcgtcatcaaaggccgcccctgcaaggttgtggaagtttcgacttccaaaactggaaagcacggtcacgctaagtgtcactttgttggaattgatat

SEQ ID NO: 10433 - DNA, 249 bp, Glycine max
  Clone ID: 701103667H1
gcaggaggatcatacgaggaagccattgcagcgttgaccaagcttatcagcgagaaagccgacctgagtacgctcgccgccgcaaagatcaagcagttgacggcggactagaaaccgccaccgcaaacggtcgacgccgtttaacccagacgagaggatccgaaccgggttcgcccacttcaagaacgagaaattccagaagaacccggaattatatggcgaacttgccaaaggccagagtccaaagtt

SEQ ID NO: 10434 - DNA, 245 bp, Glycine max
  Clone ID: 701103668H1
gtacccaggccttcgtatgacaatgaaagaacaaaaaccttagtgatagttagttggctggtcatgtgtgttctgatttgcaatttatgcctgattagtgatccttcatatcacaaaatgtggcttctaattccacatattacccttgtccatagtacgaatggtcttttgttttttatgaggtcaatggcttgatcaagtcaagtagttttagacttaaagccataaagagaaataaaagagtt

SEQ ID NO: 10435 - DNA, 249 bp, Glycine max
  Clone ID: 701103669H1
gtggatattgtggcatctttccaaaccagctatttcatttcaggacttgctccctttggtgatgctttggttgttctagcatatattcctggagaagaagatggagataaggattttagtagcaccgctctttacggcagggcaatgcacaaagaccagaagtaagaatagtaacatggaataatgatgagctttctacagatgctcttccagtacatgggtttgagcattacagggcgaaggactatt

SEQ ID NO: 10436 - DNA, 248 bp, Glycine max
  Clone ID: 701103670H1
gtccccgaaacggttcgttttgcccttcttcggaaccctcccttccgcgccgctgctgctgctccggtcgccgtcgggattctccggtaaccgaacaccatcgatccgtcaggagcctcggatctcggactgagcgaaacgaatcgaaacgaaacgaaacgatgccgtctcatgcggatctggaccggcagatcgagcatctgatggagtgcaagcctctgccggaagccgatgtgaaggcgctgtgc

SEQ ID NO: 10437 - DNA, 254 bp, Glycine max
  Clone ID: 701103671H1
ctgcattctccttcttcagtaactttctccaatttgaaagaattgttcatattcaactcgtcaaagactgaagtatttattcacatcctcggcagcaaaaaagttaagtcaacttgaggagatcatcgtctatattgtaaatcaataaaagaaatagtggcaaaagaggaagatgaaacagctttaggagatgtcatattaccgcagctacaccgcatatctctagcagacttgtcaagcttggaatgttttta

SEQ ID NO: 10438 - DNA, 255 bp, Glycine max
  Clone ID: 701103672H1
atttaatcctatcctatcgtagcaaagaaagaaagaaagaaaaccctagcttaccttttcaactttcaagatgcaaatctttgttaagacactcactggtaagacaatcacccttgaggtggagagttcagataccatagataatgtaaagtccaagattcaagacaaggaagggatcccaccagaccagcaacgtctcatttttgctggcaagcagcttgaggatggacgtacacttgctgattacaacattca

SEQ ID NO: 10439 - DNA, 255 bp, Glycine max
  Clone ID: 701103673H1
ctcgagccgctgatattgttcgtttctcaactgtcattcatgagcgtggtagccctgaaaccttgagggaccctcgaggttttgccgtgaagttttacaccagagagggtaactttgaccttgttggaaacaacttcccgtcttctttgtacgtgacggcatgaaatttccagatatggttcatgctcttaaacccaatcccaagaaccacatccaagagaattggaggatccttgacttcttctctcacgttcc

SEQ ID NO: 10440 - DNA, 216 bp, Glycine max
  Clone ID: 701103674H1
gtttctgacaccgaaattgagccaaaaagttgaccctctttggatgaatgagaatatcatgttcctcacattaatacaacctggagattccaacaattgaaaactcctaaacacccttctcttccaaccccgttcatgcttccttccaatcctttggtgtgatttcaatcgtttcataagaaaacagcactcagttcttcttcttcttcttgttct

SEQ ID NO: 10441 - DNA, 253 bp, Glycine max
  Clone ID: 701103675H1
cctcgagccgaatcggctcgagcaacaaccctaacgcgtgcagagcatagagagacgcagccatggggcgaagacccgcgaggtgttataggcaaattaagaacaaaccataccccaagtcacggttttgccgtgtgttcctgatcccaagatcaggatttacgatgttggtatgaagaagaagggtgttgatgagtttcctttctgtgtccatctggttagttgggagaaggaaaacgtttctagtgaggcc

SEQ ID NO: 10442 - DNA, 256 bp, Glycine max
  Clone ID: 701103676H1
cttccccaaccattggaatacattccttaacccaccgcaaatccaaatccaaattcaattcgagctgaacctagggtttgttccttcctattgccttcacggatctcgcattctcctcaaatttccgaaacggaaaaagaaaatgcacgcgaaatcggcgcagtcgtcgttccgggatcggactcaggaattccacagcatcacagagaggttgaagaagtccggatcagggcccaatgggcccagcagcagcact

SEQ ID NO: 10443 - DNA, 256 bp, Glycine max
  Clone ID: 701103677H1
gagaagtgaggcctattctgccatagagaactacctcagctccaaggcatcaacacaagcgaagaggctcaaagctgacatagggaagaacaaccagtctcttgttctcagcatggatgaccatgaagaagtactgatgagttcaatggtgtaaagctttggtgggcctatgggaagcacatttccaagtcacaatccacaatttccttccaccaccctatgtcagatgagaaaaggtactataaactcacttttc

SEQ ID NO: 10444 - DNA, 190 bp, Glycine max
  Clone ID: 701103679H1
aattccaggctcaaaggaacctcaattatggaatgatgtctggaagttctttgagaaagcatctttcttgaatttgatgatagtaaaatgcagaagacttatgagacaatttcattcaaggcagtccatgatgacattgttgagctcaagggattgtgtgatctactcaaatctcctgtaatttttgctc

SEQ ID NO: 10445 - DNA, 255 bp, Glycine max
  unsure at all n locations
  Clone ID: 701103680H1
tggttccaagactaagctcgaaaacaattcgtcaggctgtgggtgttgtgggttgtgtcattatgcctcacaatgtattcctgcattctgctttggtgcaatcaaggaaggttgatcctaaaaagataggtcggtgcaggaggctctcaactactattcaatggaatcggcggcggcattgcagtctccttcatgatcaatctatntgtcacaacagtttatgctaagggttttatgcacaaaacaggcagatag

SEQ ID NO: 10446 - DNA, 262 bp, Glycine max
  Clone ID: 701103681H1
ccctcgagccgcttcagaccatggcgaacaagatcattcacgacaccactaggaagatgtcgcagctgtgccagaaaatcgttaaggtcgacgtccggtggggtgtcctcaaaagggtatctttcgttggacactttttccgcttcattggaacagacttcttgtttgctccgtcgccggaaggccatctcagtaccggaaactacccgtccgggacccctcttcttcgccgccgtcctacgctgacgacgtcttcttttcc

SEQ ID NO: 10447 - DNA, 252 bp, Glycine max
  Clone ID: 701103682H1
gagcgagagaacaagaacataagggaaccacagcggcggtaacagaagaacaagcagagaatgggtcgagtgagaacgaagacggtgaagaaatcctctcggcaggtgatagagcgtcactactcgcgcagaccctggacttccacacgaacaagaagcttctggaggaagtggcgataatcccgtcgaagagggtaaggaacaagatcgcggggttctcgacgcacctgatgaaccgcatccagaagggcc

SEQ ID NO: 10448 - DNA, 238 bp, Glycine max
  Clone ID: 701103683H1
agataaagaggcgcaagatgagtggtagggtttctgggaaggtgaagtggttcaatgatcagaaggggtttggattcataagccctgacgatggcagcgacgatctcttcgttcaccaatctcagataaatctgacggtttccgaagcctcgccgaaggagagtccgttgagttcgccattgaatctgaatctgacggacgcgcgaaggctgttgatgtcactggccccgacggcgcc

SEQ ID NO: 10449 - DNA, 244 bp, Glycine max
  Clone ID: 701103684H1
caaaatggcaacatcttggtcatgttatctacttgcattgcttctttttatgtcaactattgtatcagagagtagagtggcaaggaaggacttgggcctggaccttggtgggttgggggttggacttgactgggtttgggcctggggataggaggtggcagtggctctggagctggtgccggagcagggtctggttctggttctggttctggttctagttccagttctgcctcaagttcagctt

SEQ ID NO: 10450 - DNA, 245 bp, Glycine max
  Clone ID: 701103685H1
tttctattgtcgcactctcatgtgatcaatttgttgattttggtgatgttgctagtagatctgtgtaggtttctcaaatctttcctgagctatttggaatggaaaaaggttgatagtttttatagaacattttatgtagaagaaaaaaattcttggtatctactaatgttattactttgattttgttaaaaaaaaaatttacaaacataatttcaagacttcatgataatcaacatgagttactg

SEQ ID NO: 10451 - DNA, 245 bp, Glycine max
  Clone ID: 701103686H1
acgctgtaaaggctgctgctattggcaatgacttgggaaggagcagtcaaggagagcacatattttccggtatgaattcatcacacggagctacttttcagtcgcattcacttccagagcctaaattagccaatatcgtggagcattgtcctcaattggtccatcaacatcaaatggatcctcagtggaaactttgtctgggccacagtttctatggggaagcccaactctctactcagagcata

SEQ ID NO: 10452 - DNA, 254 bp, Glycine max
  Clone ID: 701103688H1
accccatctacgctctaaactccgatccctaacttaacctaaccagacatcttcctcgcctctgccaggcacatcgtcctacgccacacaaacaccacacagatcgttccttcacatcttaccctactttgttattccccaatttcatcgaaccaataaattatatataaatatattttcatttttattttttgatgccgataaaaaatgccgccaaagcagcaatcaaaagctgatttagcgaagaagcagac

SEQ ID NO: 10453 - DNA, 215 bp, Glycine max
  Clone ID: 701103689H1
ctcattttctggctaaccaaccctgacactccttcttctccgcttactcttcgatcatcgcttcagaatgccgccgaagttcgacccctcccagatcgtcgacgtcttcgtacgcgtcaccggcggtgaggcggcgcggcgagttccctcctcccgaagatcggtaccctcggtctctcccgcaagaagatcggagaagatatcgccaaggaaac

SEQ ID NO: 10454 - DNA, 248 bp, Glycine max
  Clone ID: 701103690H1
attcgtgattgtttccgaaaacccttgtctctgaaatcaacaccaaaatcgtgaagtgtactaagcgaaccattgcaggcgtgagactggggaagaaagcaaaagggtcaaggaagggtaagaaggcatgagggctaacatcagcaccgtagagatcgaagatttcttcgagaaatcaacaaaggacgctctttctggtggctctctccaagccgtttctagcgattccctcttttatgaagacaagt

SEQ ID NO: 10455 - DNA, 253 bp, Glycine max
  Clone ID: 701103691H1
gtgtttttgttgctcatatttggacaagagattgcgtgttttatggagattgtcgagataaggaaatgaagtgctagagggggatggcatgaagggacaagttgaattaaaagtagggaagggtgactgagacgaagcatcacattcactggtggttgttggcttgtccttgtgtggttctgctttatcttaatttcatgtcatgtgctgttcctcttcactcctcctttggtccttcatcactcatggaccc

SEQ ID NO: 10456 - DNA, 249 bp, Glycine max
  Clone ID: 701103692H1
agcagattcgccaatggcagaagctgttggagattgtgctctatgcattggggcatcagaggagcattggtgagggccaatttcgtagagccaagaaggccctcattgatttgcacatcgggatgcttgagatcaggactccaacgcatcaattgcacatcgaaaccggtcctttggccgcagcactggtagcagagacagtcatagtcatggtaacaatcatagcaataataatacctatcaccatcg

SEQ ID NO: 10457 - DNA, 249 bp, Glycine max
  Clone ID: 701103693H1
gcgtgtcttgtcattgcgtggcgttggacgttgaagggcgttgttatacatggggacgtaatgagaaagggcaactgggtcatggagatacgattcagcgtgataggccaactgtggtgtctgaactttcaaatacaaaattgtcaaagctggatcagggaggagccatacagttgttgttacggatgatggaaattccctagcatttggatggaacaaacatggacaactaggttctggttctgtgag

SEQ ID NO: 10458 - DNA, 253 bp, Glycine max
  Clone ID: 701103694H1
gtgaaggctgagtccctctggagagaagggtataggctccatgattccatgcttcctttgtttatactcacttcggttgcacagaggatattgaggaccgggaaatccattaattttcttcgcgtttgttgtaggatcatggttgggctgatgctgcgaccgaggttgttgctgatcatggagcaacggcgagaacaggtggttttggatatggagaaacggatacccttgagtttttggtggatgaagcttc

SEQ ID NO: 10459 - DNA, 257 bp, Glycine max
  Clone ID: 701103695H1
gtctaataaagttactccatgatagagctacacatagccatctgcatggacgtcactcagaaccctctccaattctcaccgccgtccttcctcgtacgtttcaatccgcctcctctccttctcctcaccggggaggatgtagcggaggctgccgtagatagcgccactccgcatggaaccgcccctctccgtcctgaaccgcacccaaatcgctccaaagcccctactatcaccctattatctagacgctaacaacc

SEQ ID NO: 10460 - DNA, 52 bp, Glycine max
  Clone ID: 701103696H1
cataatctgaatatttggatgaagtattgtgcaggaccttcacgggctgaat

SEQ ID NO: 10461 - DNA, 204 bp, Glycine max
  Clone ID: 700966701H1
ttctcgagccgaatcggctcgagcggctcgagctgacatggcttcatcactcagaatttcaagactcatctctcgctcctttacttctacctccttcttttcacgaggtgggaatggtttccttggttcaagacactgcaaatacagcacttcttctgccattgaagaagaacccgttaaaccatcagtgcaagtagaacacac

SEQ ID NO: 10462 - DNA, 272 bp, Glycine max
  Clone ID: 700966702H1
ctcttcttcaattcattctagttctggattccgactcgccgcattgactcggtccgggttggggtcgactcagttcggtttttcattctctcgcgaatctaatctataggaaaagctaagggcacatcacaatgaaggcattgattctggttggggggtttggaacaaggctgaggccactgacactcagttttcctaagcctcttgttgattttgctaacaaacctatgattctgcatcagatagaggcccttaaggccattggagttact

SEQ ID NO: 10463 - DNA, 267 bp, Glycine max
  Clone ID: 700966704H1
cggagttctaaatttccggcgagtttccctctctcgaatctgcgacaccgacgaatctcactaagcggaacttcgcattcagaaaatggctttaggtggaacagctcccccgagaggaagtgcagcagctactgccagcatgaggagaaggagaacaaccggtggtgcggcctctggaggagcagctggaactatgctccaattttacactgatgatgcccctggactcaagatctccccaaatgtggttcttgtaatgagcattgg

SEQ ID NO: 10464 - DNA, 265 bp, Glycine max
  Clone ID: 700966705H1
ctcgaccgaatcggctcgagccgccttgatctccgcagcaatagtgaacgttccgaagagaaagaagacctactgcaagacgcaaggagtgcaggaagcacacgctccacaaggtcacccaatacaagaagggcaaggacagcatcgccgctcagggaaaacgccgttatgaccgcaaacagtccggttacggtggccagactaagcctgttttccacaaaaaggccaaaaccaccaagaaaattgtgttgaggctccagtgtca

SEQ ID NO: 10465 - DNA, 267 bp, Glycine max
  Clone ID: 700966706H1
ctcgagccgctcgagccgctcgtctccgattccaccctccgagattactcagtgcgccatagacgaccaagaacaacaccgccaacctcaacccaacagccacaacggttccaacgccgacccttttctcctcaactacagcacctccgatctccgaatcgcttcagagttactcgccacgtggctccctttcctctcacgagatctctgcactcgcatgcaccctgtccctctccgatcgcatccgctccatcgacccaggtgaag

SEQ ID NO: 10466 - DNA, 266 bp, Glycine max
  Clone ID: 700966707H1
cctaattctctctcactacatcgatcctcgtaaagcagctcaacctcttacctccgttcaagtttcacacgttcttccactatgtcctggttgagacacctctcctccaagttctcctccaccaccatcacaagtacgcgccgcttcacttccctgtcccggttcagtacctcgaccgctccggctcgtcatgcgggcctggggcccactcaggctcatgagaagcccaaggtggtggtgctaggctccggctgggccgggtgccg

SEQ ID NO: 10467 - DNA, 266 bp, Glycine max
  Clone ID: 700966708H1
agccaccctgacgttgctgctgaggaaccatggtatggtattgagcaagaatataccttgttgcagaaagatgtaaattggccacttgggtggccacttggtgggtttcctggaccacagggcccatactactgtggaactggtgctgataaagcatatggccgtgatattgtagatgcacattacaaagcttgtatttatgctggcatcaatattagtggcatcaatggagaggttatgcctggtcagtgggaatttcaagttgg

SEQ ID NO: 10468 - DNA, 267 bp, Glycine max
  Clone ID: 700966709H1
ctaacattacttttaattaagcttcaataaacactcgcgcgtctgttcatgcatttatttacggatttctcttaccaaattaacggatcctgaaagattatttttcctccagaagaagaaaaacaattaattccgaactaggaattcgaacttatcaaacaatcacgaaactaacgcgtggctgataattatcgatcaccgaaatgcatacaaataatcagaaaagggaaaatacgaaacgaagatctcaaagagagagagagagag

SEQ ID NO: 10469 - DNA, 266 bp, Glycine max
  Clone ID: 700966710H1
gcaagccccactcaaccaccacacctctcctcgttcacgctacccctttctgctcttcttctacctttcaagttttaaaagtataaagatggcagagacattcctatttacctcagagtcggtgaacgagggacaccctgacaagctctgcgaccaaatctccgatgctgtcctcgacgcttgcctcgagcaggacccagacagctaagttgcctgcgaaacatgcaccaaaaccaacttggtcatggtcttcggagaaatcacga

SEQ ID NO: 10470 - DNA, 268 bp, Glycine max
  Clone ID: 700966711H1
aaaccggggtgcacaaggaaattgatgttcggaagctagatgtgaatgataggcaacaaatcattgacaaaattttcagggttgctgaagaagataatgaaaagttcctcaaaaagttcagaaacagaattgacaaggttggaatccgacttccaacagtagaagtgaggttccaaaatttgactgttgaagcagattcctatgtcggcagcagagctctaccaaccctaccaaatgttgcattaaaccttcttgaatcagctcttgg

SEQ ID NO: 10471 - DNA, 265 bp, Glycine max
  Clone ID: 700966712H1
tacaaattctctgtgttgtgttgtgtacttgtgttaattgtgttgttgttgtaggaaatttaagtgaagagagaatgatgatgaagtctgctatgtgtgcattggtgcttgtggcactggttgtggttgaagtggggcccatggctgaggctgcggtgacttgcaacccaacacagttgactccttgtcttccggcaattaattcaggttctgcaccttcgagtgcttgttgccagaagctgaaggagcaaaagccatgcttctg

SEQ ID NO: 10472 - DNA, 266 bp, Glycine max
  Clone ID: 700966713H1
gaagacgctcaccggaaaaacgattactctggaggtggagagttctgatacgatcgataacgtgaaggcaaagattcaggataaggaggggattccaccggatcagcagcgtcttatcttcgcagggaagcagcttgaggatggacgcacgtgtgcagattataatattcagaaggagtccacgcttcaccttgtcctcaggctccgtggtggtgatttctagttcagttgaatcttgctaatgagatgtttcagttctaataata

SEQ ID NO: 10473 - DNA, 262 bp, Glycine max
  Clone ID: 700966714H1
caggatccgagagatgatcatcaacgtgaaggaatcgacggtggtgcggccggcggaggaggtggcgcggcgggtggtgtggaactccaacgtggacctggtggtccccaatttccacacgcccagtgtatacttctataggtccaacggcacctccaactttttcgacggcaaggttctgaaggaggcactgagcaaggtgctggtgccgttctacccaatggctgggcggctccggcgagacgaagacggtcgcgtggag

SEQ ID NO: 10474 - DNA, 268 bp, Glycine max
  Clone ID: 700966715H1
caaggatgagtccttcgggattgtcaacatgctctgacagtgcagttgaactagcattcaccccaagtttgattaatgaaagcagtgagaatgcattggagttgactttgagtcgccggattatagaggatcttcattattcatctcctcctagtacactggatggtggaatggatgatactatctacgaacaacttgagcaggctagagctgaggctgagaatgctacgctaaatgcataccaagaaactgtaaggcgtaggaaagc

SEQ ID NO: 10475 - DNA, 273 bp, Glycine max
  Clone ID: 700966717H1
aaataattgtgataatgaaacagttagaagcaacgagcagcggctaacaccggaatctgcaaactcaaaagttccatctcttcttccacacatccatcgttatacattttcccgcaaaatattttctttctctgttctgtgccttcttctccaccgttggttcaaaaatcgcagccgttgatcagattgagcctccgtgttgatcttcatcgccatcatggaggtccgttccaatcccgcctccgacaactcctccgaccaccttcgaccgcc

SEQ ID NO: 10476 - DNA, 270 bp, Glycine max
  Clone ID: 700966718H1
gctgattacaacatccaaaaagaatctaccctccacttggttctccgccttcgtggtgggatgcaaatctttgtcaagactctcactggaaagaccatcacccttgaggtggagagctctgacactattgacaatgtcaaagccaagattcaggacaaagaaggtatcccaccagaccaacagaggctcatttttgctggcaaacagcttgaagatggccgaaccttggctgattacaacatccaaaaagaatctaccctccacttggtg

SEQ ID NO: 10477 - DNA, 266 bp, Glycine max
  Clone ID: 700966719H1
catcaatcctctctaggaaccatctaccggcaacaggcggcgctgtacctgctcttcatgctgctgtacgtgctggccaccacgctgggggtctcttgggacgcacacgtcagtcgctactacatgtacggcgacgggtcagcgacgtctgtggcgcggattgtcctggaggcggcagtggtgctcatggatgccaagtacctgctagacgaggcgcggcagctgcagctgcacggcgttgtgcagtacatgacggggtacaactc

SEQ ID NO: 10478 - DNA, 265 bp, Glycine max
  Clone ID: 700966720H1
ctccgtagatcttaggaatgcatcccaaagatctctagcttctcacttgaattcaccacgttccatgggatacccgtctttgtcatctcttaactcgcggtacatgtctccacacattccaagtccaagcaatgcttcggtgagctatatgggctcatccagtcatcaacaacatcctctccgctatagtgagtcagctgcaagcttctccccatttgcatcgacacactcccttccggaatgttaaattgttcaattgattata

SEQ ID NO: 10479 - DNA, 265 bp, Glycine max
  Clone ID: 700966721H1
cagttttggagtacttgtgttggagatggtctcaggtagacgccccacagatgtactcagccatgaaggctcaagcttgtgtgagtggattaaaaagcaatacacacaccaacaccaacttgaaaactttgttgaacaagcactgcaaaggttctctccttgtggcgtgccaaaccatcgtaacaaaatttggaaagatgttatactagaactcattgagctggggctagtatgcacacagtacaatccttcaacaagaccaagc

SEQ ID NO: 10480 - DNA, 264 bp, Glycine max
  Clone ID: 700966722H1
ctcatctatctttgcttccccttagtcaaacaaagtaacacaccatccatcctctctctcttctcttcttctgttctctagtttcctgctcttgtttcttagaatccgtacggtctaatcaacacaacaaaatggatgcaattagttgcctggatgagagcaccaccaccgagtcactctccataagtcaggcgaagcttcttcgacgattatgtcgtccgagaaggcttctccttccccgccgccgccgaacaggctgtgccg

SEQ ID NO: 10481 - DNA, 264 bp, Glycine max
  Clone ID: 700966723H1
attggagcgggttatctggggatttggggatggatcaaccattccagtgtttgaaactcccgttggaaaaataggtgctgccatttgttgggagaacagaatgccactattaaggacagcaatgtatgccaaaggtgtggagatatattgtgctccaacagctgatgccagggatgtgtgtcaggcatcaatgacccatattgcacttgaaggtggatgttttgttttgtcagcaaaccagttttgtcggagaagggattaccc

SEQ ID NO: 10482 - DNA, 266 bp, Glycine max
  Clone ID: 700966724H1
ctatactctctctagagtaattgcggaatcagctagaattttctaataatggccaaagacgttgagcaggttacagagcaaggtgaatactccgcgaaggattaccatgacccacctccggcgccgttgatcgacccagatgagctcactaagtggtccttgtacagagccgccatagctgagttcatagcaacactccttttcctttacatcaccgtgttgaccattattggctacaagagacagagtgacaccaaaatccccgg

SEQ ID NO: 10483 - DNA, 65 bp, Glycine max
  Clone ID: 700966725H1
ctcgagccggtgtgtttgtactgtacttgtgctcgtttttaaatcaatgactttccttttcgttt

SEQ ID NO: 10484 - DNA, 266 bp, Glycine max
  Clone ID: 700966726H1
aggtagttggtgttctttgggcaaataagagggatagtggactatggtttgcgcctcctgagtggagagaatgtaggctcggcattcaactcttaccaatactgcctatttctgaagtcttgttttccaatgttgattttgtgaaggagcttgtggagtggacattgcctgctttgaatagggaaggtgttggagaaggatggaaggggtttgtctatgctctgcagggtatttatgacaatgaaggtgcaatgcagaagataaga

SEQ ID NO: 10485 - DNA, 261 bp, Glycine max
  Clone ID: 700966727H1
gttcacagagagaatggctgcggaaaacgttgttgagttcacagacttacccgtcaagaggccaagagaagaagaagaaggaaccaatggcgtctccaacgacgccgtttcagcgctccccaatgaccctcaataccctggcatctctgcggttattcccggttggttctccgaaatcagcccaatgtggcccggggaggcacattccttgaagatggaaaagattttgtttcaagggaagtctgactatcagaatgtcat

SEQ ID NO: 10486 - DNA, 265 bp, Glycine max
  Clone ID: 700966728H1
gaaaggtgttgttctcagatccatccatcagtggtgggcgatgttgttgttctcagatccagactgagggggtgaaggaaaatgaagtcgtcgaggcgtctgttgaggatcgggcttgtgtcggcgtggtactcgtcgaacattggggtgctgctcctgaacaagtacctccttagcaactatggcttcaagtaccctatcttcctcaccatgtgtcacatgaccgcttgctccctcttcagctacgtcgccatcgcctggctca

SEQ ID NO: 10487 - DNA, 263 bp, Glycine max
  Clone ID: 700966729H1
ggatgacctctatattgatcacaatctcagcttaaccgaggcactctgtggcttccagtttgctgtcaaacatcttgatggtaggcaactattgatcaaatcaaaccctggggaagtcatcaaaccaggtcaatataaagcaataaatgatgagggaatgccacaacacaataggccattcatgaagggtcgcctttacatccagtttaatgttgatttcccagactcagggtttctttcccctgaccaatgccagttactgg

SEQ ID NO: 10488 - DNA, 264 bp, Glycine max
  Clone ID: 700966730H1
ggccaggcaagccccactcaaccaccacacctctcctcgttcacgctacccctttctgctcttcttctacctttcaagttttaaaagtataaagatggcagagacattcctatttacctcagagtcggtgaacgagggacaccctgacaagctctgcgaccaaatctccgatgctgtcctcgacgcttgcctcgagcaggacccagacagcaaagttgcctgcgaaacatgcaccataaccaacttggtcatggtcttcggaga

SEQ ID NO: 10489 - DNA, 267 bp, Glycine max
  Clone ID: 700966731H1
gaaaacttgatctgcctttgctttgttatttcattaacagcacccctttgggccatatattggttacctcaactgcttttctgttcatctttccagaattattgtaaagttccctttttttgttctgtcttttcattcttttttcaaagtgaattcctgggattttttgttttcaattgagggcactaaaaaaaaagaactgactggaatttccatttgtcttgctgggtccctgagatttgaagtgtgttgttttccttttggtgg

SEQ ID NO: 10490 - DNA, 98 bp, Glycine max
  Clone ID: 700966732H1
gtgtatttggagagttctttgtggcaactgacacaaatgctgaaataaactcacctattactgttcatgcatctgaatatcatcgatttggatggttg

SEQ ID NO: 10491 - DNA, 273 bp, Glycine max
  Clone ID: 700966733H1
ctcgagcgattcggctcgagcggctcgagcgaaaacccgaatccggacccggttgtgatacgccaggtttgggcttcaaatctcgaatccgaattccaactcatccgcgaactcatcgaccactatccttttatctcgatggacacagaattccccggtgttgttttccgaccacacctggaccccacaaaaccctacaaccaccgcaacaacaatcgcaaccgccactccgaccactaccgcctcctcaagtccaacgtcgacgctctcaac

SEQ ID NO: 10492 - DNA, 269 bp, Glycine max
  Clone ID: 700966734H1
gcagacagtaaggttggtaatggataggtttgaggtcaagatgctgatgaaagtttactgaacttgtttgaggagctaaacatttccatattgtgctttttatgtcccaagtatggaatcatttatgttttacatgacattgtttatatgggaaaccaattctgctgtgatatctgaaataacttatacagtggatttttctctcttgttatgaagattttgttttcatttattaataattattgccagctatttgatcatgataagtt

SEQ ID NO: 10493 - DNA, 266 bp, Glycine max
  Clone ID: 700966735H1
gatatttacgtctacggcacgccaacgttggagtttccggggctgattaaggttggtgtgcacgggggggagccgtgcgacccggataagaggccgtggggagcagcggtgatgatggaaaaactcaaagaatgggtggagtttacgttcaaggggatggttgaatccactgagcccgtcatcaaacagtcttgcatctactccatgacgccagatgaggatttcctcattgatttcttgggtggggactttgggaaggatgtggt

SEQ ID NO: 10494 - DNA, 263 bp, Glycine max
  Clone ID: 700966737H1
gtcaaaccataactattccatttctttccaccccacagtttctgaattctgggtgttgagtttcattttctccatttttttttctctcccttggatgtgttattttcaatccaaaagatcatgcaaaaaactatatttgagaatctgaaagagtgactaggtggtctatttgagcttgtgaagtttgtgtttgtgtgaaaggtgtgaggcttattattcatagaagagtttgtgtttgttcacataattgatcgtggtgtggt

SEQ ID NO: 10495 - DNA, 263 bp, Glycine max
  Clone ID: 700966738H1
aaacaatttaccagctatacttgttccttttgaaggttagaagtgctacaatacaaacaatggcagctactcaggaagatgtgaagcttttgggtattgtgggaagcccatttgtgtgcagggtccagattgcccttaagttgaagggagttgaatacaaatttttggaagaaaatttgggcaacaagagtgatttgcttctcaaatacaaccctgttcacaagaaggttccagtgtttgttcacaatgagaagcccatagca

SEQ ID NO: 10496 - DNA, 83 bp, Glycine max
  Clone ID: 700966740H1
ctgagatgcctcatatattatttcattattgtgtaccacttttcaaacttgcttggggtttgtaacaacaacaaccaccaaaa

SEQ ID NO: 10497 - DNA, 237 bp, Glycine max
  Clone ID: 700966741H1
ctcgagccgttcgtttcgacggagaacaaataacgcaacccacccaaggttcgcatcgcatcgcatcatggcccaagacaaaaaggagcgtaaaaggagcatgaagaagaagcagaaccaatctctgacaactctgcctcaggaattgatcagagaaattcttctgagattaccggtgaaatctcttctgcgtttcaagtgcgtctgtaagtcgtttctgtctctgatttcggatcc

SEQ ID NO: 10498 - DNA, 265 bp, Glycine max
  Clone ID: 700966742H1
ctctcgcattccgtggagatctagtgcttctgctgcaagacctcgctgaaaattagggtttcgattcggaggtagacgaagatgttcggaagggctccgaagaaaagcgacagcaccaggtactacgaaatcctcggcgtttccaagaacgcttcgccggatgacttaaagaaggcttacaagaaagccgccattaagaaccatcctgacaaaggcggggatcccgagaagtttaaagagcttgctcaagcctatgaggttctga

SEQ ID NO: 10499 - DNA, 262 bp, Glycine max
  Clone ID: 700966743H1
cagagaattagtccatagcaatggcagagcaagacaaggtgatcctacacgggatgtgggccagcccttatgccaagagggtggaattggcccttaattttaagggcataccctatgagtatgttgaagaagacttgagaaataagagtgatttgcttctaaagtacaaccctgttcacaagaaggttcctgtacttgttcataatggaaaggccattgctgaatccatggtgatccttgagtatattgatgaaacatggaa

SEQ ID NO: 10500 - DNA, 264 bp, Glycine max
  Clone ID: 700966745H1
tttccattttccaaagcctaattgatcgtgctcgaaggaccgtgcgaggatctgcagatgatataggatggcttcaacgtgatcctggaatgcctccggttgaagatggaacagagaggttcctggaaattctggacaacatcaagcatggtgttcacaagttaccaaattcggtggtttatttgttaattccaggtcttttcagtaatcatggtccactttactttgtcagtacaaaagtcagtttttcaaaaatgggtttgg

SEQ ID NO: 10501 - DNA, 261 bp, Glycine max
  Clone ID: 700966746H1
gaatctcgctgggatgaattagttggagaaatgcccctaaaaatatcttatcctgcaatagagagccatgagtggcgaattgttactggttgtgatcccaaaaataccagatggagttaccataatggaggatcttggccagtgctcctgtggctagtaacagctgcttgtatcaaaacggggagaccacagattgcaagacgtgcaattgaacttgccgagagtcgtttactgaaggatgggtggccagagtattatgat

SEQ ID NO: 10502 - DNA, 265 bp, Glycine max
  Clone ID: 700966747H1
gtctcaaaggcccacggttcctcactcctcttccatagcctgcggccttcactctcatctcctggtctccagtgagatgaaccctagctccaattggtccctttaatcaattacctcttaattagtaattacttaatctcaattagcctttcactctcccacacaacaacatcatgggcgtcaaaggttttgtcgaaggaggcatcgcttccatcattgcaggatgttccacacacccacttgatctcatcaaggtccgcatgca

SEQ ID NO: 10503 - DNA, 109 bp, Glycine max
  Clone ID: 700966748H1
attctctcttttttacgtacatgaaattaataaaggaactttcgcgagagacccaacacaaaagcaatcaaatcatagattgatttggcaaccccaattcccttttttg

SEQ ID NO: 10504 - DNA, 270 bp, Glycine max
  Clone ID: 700966749H1
ataaaattataaggaaggaaaagcttcaccctgccccatcaagagctgtggaatagaattgcatagctgaaaatgaggagtacttgtgatgaatggaaatcttttatagtaatgatagcaattgatttttcttttgcggcagtgaatattcttctcaagaaagtccttgaagagggaatgaaccatttggtttttatcacataccggctgtcaattgctaccattttcatagccccaatctgctactttagggaaagaaacgacagaccg

SEQ ID NO: 10505 - DNA, 266 bp, Glycine max
  Clone ID: 700966750H1
cagggaccgagttgttgaagctagagatgagttgcatagaatgttgaatgaggatgagttgagagatgccgtgcttctagtttttgccaacaagcaagatcttcctaatgctatgaatgctgcagagataactgataagcttggtcttcattccctccgtcagcgccactggtatatccagagcacatgtgccacatctggtgaagggctctatgaaggacttgactggctctcaaacaacattgcaaacaaggcgtagagatttg

SEQ ID NO: 10506 - DNA, 263 bp, Glycine max
  Clone ID: 700966751H1
agaaaagagaagaaacaaaacaaaaaagagcagagagagagaggaaccatcaccaaccctaatttcttagctaaaccctattcgtttagcatttcctctcttttctcccactcgtaaatcctctcccaaacttttcagatccaaataaatcatggttttctgggtttttggctacggttcactggtgtggaaccctggattcgattacgatgagaagattataggtttcattaaggactacagacgcgtgtttgatttagcgt

SEQ ID NO: 10507 - DNA, 262 bp, Glycine max
  Clone ID: 700966752H1
catcagtccttctgaactcaacaaccaatcaggctgagaagaatgctcctccaaatctcacagtaagaggctttgacttcattgacagaataaagagccttgttgaagctgaatgccctggtgtggtctcttgtgctgatatcctcactttggctgccagagacactattgtagccacaggtggacctttttggaaagttccaactggtcgaagggatggggtcgtctctaacttgacggaagccagaaataacattcctgc

SEQ ID NO: 10508 - DNA, 263 bp, Glycine max
  Clone ID: 700966753H1
gttcggttcagcaacaatgttatcggactccttaacttcctcaccttcctcttgtccatcccgatcctggtggccggagtgtggctgagcaagcaaggcgccaccgagtgcgagcggtggctggagaagcccgtcatcgcgctcggcgtcttcctcatgctcgtctcactcgccggcctcgtcggcgcgtgctgccgcgtgtcgtggctcctctggctctacctcctcgtcatgtttgtcctcatcgttcttctcttcgcctt

SEQ ID NO: 10509 - DNA, 261 bp, Glycine max
  Clone ID: 700966754H1
gcttgccaagctaggcataaggcccttctcatatgggcttgtggttctctctgtttatgataatggttcagtgttcagccctgaggttcttgatcttactgaggatgacctcattgggaagtttgctgctggtgtctcaatggttacttcactttcattggctatttcatatccaacacttgctgcagcaccacacatgtttgtcaatgcctacaagaatgttcttgctgttgcggttgagacagattattctttcccgga

SEQ ID NO: 10510 - DNA, 265 bp, Glycine max
  Clone ID: 700966756H1
cagtcggcaacctcgccctcaaaattcccgttgcttctaaacccgcgctctccgttgttcatccttcttcttctccttgtttctgcaaaatcaagctcaagaattttcctcttcaatccgccgtcgttcctttcattcctccggaaagccacttccccgactcgcaggtgcatcctattgccgccacgttccacctcagcaagtccgatatcgacaagctcgccggataatccatcttcgccgggaagctctgcctcaaaatctc

SEQ ID NO: 10511 - DNA, 262 bp, Glycine max
  Clone ID: 700966757H1
gtcaaagttaagcattctcttcctcctagtcttatccttcagttctgtactctcagaactatgcaacccacaagacaaacaagccctactccaaatcaagaaagatcttggaaacccaaccactctctcctcatggcttctaaccactgattgctgcaacagaacatggctaggtgtttcatgcgacaccgacacccaaacataccgcgtcaacgacctcgacctctccgatcttaacctccccaaaccctactctattcct

SEQ ID NO: 10512 - DNA, 263 bp, Glycine max
  Clone ID: 700966759H1
tgtgaatgcaggagccttcagaagaggcttttgacattgattcagtgcccagggaggtcaagtctcaaccacttgcagagaagaaagcccctggtaaaaagcctactggtttgggtgctcctcctagtggtcccccatctactgcagatgcatatgaaaggctgcttctatccattcccgagtttgcaaactttgggaagctttttaagtcttcagaacctgtggagcttactgaagcggagacagaatatgcagttaatgtt

SEQ ID NO: 10513 - DNA, 238 bp, Glycine max
  Clone ID: 700966760H1
ggttcatgttggattttaatagccatagtgacgtattgatcattcttggcctttcaactaaatagtatttgtgtagtaaattaaaggcacttggatgtaccaaacttcatgctttttgtaggagtgcgtaggttttaaaaattttctgatgtatctttcatgtgtttgttggttttgtaacagaatatttcctatattatacatatatttgagtcactaaaaaaagaaatataagata

SEQ ID NO: 10514 - DNA, 114 bp, Glycine max
  Clone ID: 700966761H1
cctcgagccgattcggctcgagctcgagccgcttgtgaggttgtgctacatacccctagatgaaggtgaagagtcattcaaggacctattagaaagtgtgccttggttatcctt

SEQ ID NO: 10515 - DNA, 264 bp, Glycine max
  Clone ID: 700966762H1
cttagcttaaaaaacagggtagttagcctttggaaagcctcataagaaaggaccaaaaggggtgccgaataacccatctttggtcctcaacaatatatcatccttgtatgcaaaagctccattaatatgcatgtgacatgcttgatatctatatagaaaaagtgtcaccttgatttagagctttaggtagtgtgaaggaaaacttgggaaatggatgtgaagaagtactggttcggttcaagaagtcaaaggacacaaaacata

SEQ ID NO: 10516 - DNA, 266 bp, Glycine max
  Clone ID: 700966763H1
ctagaatgttcaaaattcagcaatttggttattcttgtcccctaaaggccaacatcgaatcttccatcttgcacacaacgctcctgcacgatcctgtcactaagtttcttgtgtgaataaaaagggagaggaagggagaataaaggataaatcctttgtttcttaatcttcattcaaaagttatgggagtctagttcagctggttgaaaaccctaattctctttgactactaactagtgtcagacagagcatccaaactttggaat

SEQ ID NO: 10517 - DNA, 261 bp, Glycine max
  Clone ID: 700966764H1
gtgaattgaaattgaagtgactcggggtgagttgactcagcaatggcggaagaggtgactcgggtgatggtggcggtgaacgagtcgagcattaagggataccctcatccttcgatcagcagcaaaggggctttcgactggaccatcaacaagatcgttcgcgacaacgtctctgccttcaaccttctttttcttcacgttcacgtccccgatgaagatggttttgatgacatggatagtatctttgcttctcctgacgat

SEQ ID NO: 10518 - DNA, 270 bp, Glycine max
  Clone ID: 700966765H1
gtggcagtgcctcctcctccaccaccttcttcttccatggactttaacttcgatagcaactgttcctccccttacatcactgcaccttccagcccccaacgctttggcaacttcttcttcagtgcccccaccagccccactcgcagacactcctctgcttccactcccaacaccacccaagacgagttcgaattcgacttcagtggtcatctccagatgccttccctttccgccgaggaactattcctgggcggaaagattagacctctc

SEQ ID NO: 10519 - DNA, 265 bp, Glycine max
  Clone ID: 700966766H1
aaaaaatctacactatctatccttccacaacacaacacaattcaataccatttaccaaactcactcatcaattctcatctttcttctcactaactattaattcatcatgtcgagcacagctggccaagtcatcaaatgcaaagctgcggtttcatgggaggcagggaagccacttgtgattgaagaagtagaggttgcgccaccacaagctggtgaagtgcgtttgaagatcctctacacctctctttgccacactgatgtttac

SEQ ID NO: 10520 - DNA, 260 bp, Glycine max
  Clone ID: 700966767H1
cggctcgaggaataggtcatggtggaaacgcgggtagaaagtggagacccaagggatgtgatctgtgatatgtctcaaaagttaggtgctgacttgttaatcatgggtagccacggctatggagttgtaaagagggctttccttggaagtgtgagcaattactgctcacagaacgtgaagtgcccagttttgatagtcaagaagccaaaaccatctgctggtgctggaaaatgatctgccacttttgttctgtttttggg

SEQ ID NO: 10521 - DNA, 262 bp, Glycine max
  Clone ID: 700966768H1
aaaatttttaaactttgtggttcaccttctgaggactattggagaaaatcaaagttgcctcatgcaacaatatttaagcctcaacaaccctataggcgatgtgtttctgaaacgttcaaggagtttcctgcacctgcaatagaattgatagagatccttttgtccatagatcctgctgatcgtggaacctcagcatctgctttgaatagtgagttcttctcaaccaagcctctaccttgtgatccctcaagcttaccaaagt

SEQ ID NO: 10522 - DNA, 260 bp, Glycine max
  Clone ID: 700966770H1
ctcgagccgctaaccctcacgaaagcccttttcgattccgataactctcgttgttccgaaaccctaaccctaaccgggttttttcgtttgtttggattgaattggcatcggagggaggcgatcgattggaaattggtagtagtagtttagcgttgaagaacgatgtctgctgctgtgtgcggaacaagagatctttcttcgaagagcttcctccttctccgccactctccaagaggctccgttgttcctcttcgccgatt

SEQ ID NO: 10523 - DNA, 125 bp, Glycine max
  Clone ID: 700966771H1
aaaagaactaaacatggcagagaccattcgtttggctgttgctgttcttggtacttcttcgttcattaattccttcatcttagaacttaggattataaattatttattactcattatttgagtct

SEQ ID NO: 10524 - DNA, 260 bp, Glycine max
  Clone ID: 700966772H1
cggctcgaggttcacggtgtcaaatctatcaagctctatgttcctcctcgtgttattcatagctcttgtctctcatacacacggaagcaagatcgaccaccatagaagcaacaaacatgttgccctcttcatttttggcgattctttcttagatgctggcaataacaactacatcaacgcaacaacccttggccaagcaaatttctggccctatggggaaacatacttcaagttcccaacggggagattctctgatggac

SEQ ID NO: 10525 - DNA, 264 bp, Glycine max
  Clone ID: 700966773H1
cttcttaattcaacaatggcagataactcaattagcttattttctccatacaacaagatgggcaaattcaacctctctcatagggtggtattggctcccatgaccagatgcagagcgctcaatgggactccactggcagcacatgctgaatactacgctcagagatcaacaccgggtggatttctcatcactgaaggcaccttgatctctccaacttcttctgggtttcctcatgttcctggaatatactcagatgaacaggta

SEQ ID NO: 10526 - DNA, 264 bp, Glycine max
  Clone ID: 700966774H1
aacaccccaagtttgctatcactaagagtgtgaactatcttccaaatgtgctctcaaaggtggaagctgaagaagctggtgcttttgtaggcatttggcttgatggtgaaggttttgttgctgaagggcctaatatgaatgtggcctttgtcactaaagataaggaacttataatgccacactttgacaaaattctaagtggctgcacagctaagagagttttaacccttgctgagagcttgttaagggagggtaagcttaaag

SEQ ID NO: 10527 - DNA, 260 bp, Glycine max
  Clone ID: 700966775H1
ctcgagccgtgaaaacctaaggaaagtggatggggatgataacacatgtataatagtgggaaaggtggtggtcaccaaaaatccttgccttcacccaggagacatcagagtccttgatgctatctacagtgaagaattagaggagaagggtttgagggattgccttgtatttccacaaaaaggacataggcctcatccaaatgaatgctctggaggtgatctcgatggagatttgtttttcataagttgggacaaagatc

SEQ ID NO: 10528 - DNA, 263 bp, Glycine max
  Clone ID: 700966776H1
atttttcagcaccccaccaaggttttgtccgaaaagcttgaatttttcgcctaccctttacaatgatctcttcattgagacaacctgttgtagggatcagtggttctgatcttcttttgaggcaaagacatgcaaccctaattaaggcaaggtcctttttaccctctttgtcaagagaaaagggtcaaagatctcttgtttcagttcaaaagccacttcacattgctgcttctcttggtgttggaaattttgtgtcagtgaag

SEQ ID NO: 10529 - DNA, 263 bp, Glycine max
  Clone ID: 700966777H1
gaagaaggttgccgcacgcccaaacgcagcgcttgtcggatacccgcggcgatgtgtgtgtcctccgccgccgaagaagaagtcggcggcttacacggcgagacagagggtcccacccaagaacggttactttgtgccgccggaccttgagctcattttcagagttgcgccaacaagagaagcttttacttagttcatctaaaaattgctgtatacttactgtgaccctttagaaatgtagtcacaaatttaacagcatttta

SEQ ID NO: 10530 - DNA, 262 bp, Glycine max
  Clone ID: 700966778H1
ggttattatgtaagctatgacaattggggtaataaagaagaggttgatcctgccaatataaggtcaattcaagaaggttctgttgatgctttattagaagctgagcgagttgctgaagcaacaaaacaggccatcaaacgaaaaattgtgcaagctgcatctatcgatttacagtctcggagtctacctgcaaagcttcgtatagaggctgatgatcctgaggatgtgaaagcttcgaaacgcaagaaaatacatgccttta

SEQ ID NO: 10531 - DNA, 263 bp, Glycine max
  Clone ID: 700966779H1
cggccatgttgagatacttaagagggctagggagcttggtgactttcttctagttggtatccactcagatgagacagtgagtgagcatagaggaaatcactatccaattatgcatctgcatgagcgtaccttagtgtgttagcttgccgttatgttgatgaagttattattggttcaccttgggaaattacaaatgacatgatcaccactttcaatatctcagtagttgtgcatggtactgttgctgagaagacattaaattg

SEQ ID NO: 10532 - DNA, 95 bp, Glycine max
  Clone ID: 700966780H1
caaaaacccaacacaagtaacgaagaagtcactgccatctcgcaagtttcgatccccagaaggaaaataaaaatgcacgaaattagagaccctgc

SEQ ID NO: 10533 - DNA, 259 bp, Glycine max
  Clone ID: 700966781H1
ggagttgaaagaaagaaaggaaggatgggagtgacaccgaaaattgctccttcgatgctctcttccgacttcgccaatttggcttccgaggctcagcgcatgctccacttcggcgccgattggctccacatggacatcatggatgggcattttgtccccaatttaactattggcgctccagttattgaaagtttgagaaagcacacaaagggatatttggattgtcaccttatggttacaaatcctcttgattatgttg

SEQ ID NO: 10534 - DNA, 263 bp, Glycine max
  Clone ID: 700966782H1
gtagaagagaaggttcctttggaacacttatttctatttcagtataccgggtctctttctttcatttcaaaaaatttatagaatttcgattttgaaatgaaagaaaagtgtggggataaatataaatgacaaaaagatattggaacataatcttggaagagatgatggaagcaggagttcattttggccacggtactagaaaatggaatcctaaaatgtcaccttagatatctgcaaagcgtaagggtattcatattataaat

SEQ ID NO: 10535 - DNA, 260 bp, Glycine max
  Clone ID: 700966783H1
gccacgagtgttggtgagaagaatgtgttgatttttgaccttggtggtgggacatttgatgtgtctttactcaccattgaggagggtatctttgaggtgaaagccactgctggtgacacccatcttggaggtgaagattttgataacaggatggtgaaccactttgttcaagagttcaagagaaagaacaagaaggacattagtggaaaccccagagcacttagaaggttgaggactgcttgtgagagggccaagagaac

SEQ ID NO: 10536 - DNA, 260 bp, Glycine max
  Clone ID: 700966784H1
gggctgatgagtgatggttgttgatttgattgagaagagaaagagaaagtaatcagaagaattggagtgagtgagaagaaagaaatgggttggggaaggggaatgttggaaggggtggtggtggtgggatgtctgtgtttactgggttgggcgggtctgtggtttttgaaccgtcgactctacaaagagtacgaagagaaacgcgtcctcgtccaaatcatcttcagcgtcgtctttgccttctcctgcaatcttctcca

SEQ ID NO: 10537 - DNA, 260 bp, Glycine max
  Clone ID: 700966785H1
caatttctctctttttgctcagtttctgttgtattttctcaattacaacatcgtattctgcaaattcaaaccgggtcttggttttctgaaagatgggaggtggcaaggacaagcatcatgatgaatctgacaaaggaattttttcacaccttgctcatggggtagctggtgcagcacatggtggacatgggtacccacctggggcttacccaccaccacctggggcataccctccacaacaaggatatcctccagctggg

SEQ ID NO: 10538 - DNA, 261 bp, Glycine max
  Clone ID: 700966786H1
cagctccaagctggaggatctaccagcagtggccctttgcagggagcggtgtggtttccttgacgaagcaattcaccagcgctacgcactggccgcagctcacatggcctacatcaactccctcaaggcaattggtcactccttacaccttttcattcagcaagacatggatgctcctccctctccctctccctccccctccccttctccccctcacaaaccctccaaacacgcctcttcttctcactccgactccgccgg

SEQ ID NO: 10539 - DNA, 261 bp, Glycine max
  Clone ID: 700966787H1
gaaatggaggacccggaaccgtcaagaagataacagctagtgaaggtgaccaaaccagtttcgtgctgcaaaaagtggatgcaattgacgaggctaacttggtatacgactacagcatagtgggagggacggggttgcatgaaagtttggagaaggttacattccaaacaaaggtggttcctggcactgatggtaatggctctatcgccaaggccactctcacattccacaccaaagacgatgcaccactctcagatgcag

SEQ ID NO: 10540 - DNA, 262 bp, Glycine max
  Clone ID: 700966788H1
agaaatggcaatggtctgagagatgcagatgtgatgtcaagggtgaactcgctatactgtcttctgcagaaggatccttctacagcagaagacacagacacaatgaccagaaatggcaatggtcttgatgcagatgagggtggaaaagttggtgtcagtaactctaacaccactgaattgtcagcatgcaaaattaaagtgcctgatttggaagttcaaccggatgatgcttctggctgcaagcagggggttagtggtatgt

SEQ ID NO: 10541 - DNA, 261 bp, Glycine max
  Clone ID: 700966789H1
gcacaaccacaacaatctgttgtaactaaggtcacacagcacatgcagattcctcttacatatgcagatgctgttataggagcatcgggcacaaatatcagctatatacgtcgtgctagtggagcaagtattacaattcaggaaacaaggggtgtgccaggggagatgactgttgagataagtgggacttcttctcaaatacaggcagcccagcagctggttcagaatttcatggctgaagctgcaagtgcgacacaggat

SEQ ID NO: 10542 - DNA, 262 bp, Glycine max
  Clone ID: 700966790H1
ttctcgagccgaatcggctcgagcttcctctcatcctctataaagaaactgcttaatttgtgttagttacttggttcagtttccatggattgggggcttgctatatcttctcatcctaaaccttattcagtcacaactggtggaaatctctggcggagtaaacacaccaccaagaatatttactttgcaagttcttggatatcaaaagcttcacgacacaaaagggaaactcaaatagaacataatgttttgaggttccaac

SEQ ID NO: 10543 - DNA, 262 bp, Glycine max
  Clone ID: 700966791H1
cggctcgagccaattcctatcgcggaaataaaaccaaaaaaacttgttatttctgccatgctgtcctaaccgccatggcgccaccattcgcaacccaccacgccacagttattcgttggcattttttcaaaaaaccgccacatctttccgccatggctgtcatttgacaacactggtgaagaatagttcaagtgggctactaaattgcattggttatgattttgatattcagtatagaccaggaaaggagaatatagtggct

SEQ ID NO: 10544 - DNA, 262 bp, Glycine max
  Clone ID: 700966792H1
aaaagattgaaaaagtaaaccgtgaaaggaaatatcatcagcaaaacactgcatatgagcttaatgcgttgtccatgcaatggaaggagctttgtcagaagaatatagacatcagtgctgcctgtgcttcagttgaaaatcgcataaatgaattgaaaagaggagcagcagaaagaggctggaacttggaagctgtaactgaaaatggccaattggcaaaatccgaattatgagattcgtatgttctcatctagttttgtat

SEQ ID NO: 10545 - DNA, 262 bp, Glycine max; identical to SEQ ID NO: 9192
  Clone ID: 700966793H1

SEQ ID NO: 10546 - DNA, 263 bp, Glycine max
  Clone ID: 700966794H1
caacaccaacatgaagagcatggtgacgccattgacgagggtcttaccctttcgtcacccaaatggctataatacccttcccttctctcttacacgctacccttcctcaccgaacttctccttctccttctcccctctcactctcaatctttccatggccgcttcaccacaatcctccgctccgactgtgtcgcctggtgatgctaacatcaacaaagatggtgtatttcaattgattcaagcacatcaggaaaaagctgcta

SEQ ID NO: 10547 - DNA, 262 bp, Glycine max
  Clone ID: 700966795H1
taacgcactcttctaaacttaacacaatggagcttagcaaattgacgttagagatcttctcaaaattggagcagcaatggctctcgcactacgaagcatcaaccaaaacgcgcattctcagcattgacggcggaggaaccaccgccattgtcgccggcgcttccctcgtccacctcgaggaccagatccgcgcccaaacctccgatcctcacgcgcaaatcactgatgactttgacatcatcgccggcaccggcattggcgc

SEQ ID NO: 10548 - DNA, 259 bp, Glycine max
  Clone ID: 700966801H1
gtgcaaaaaaacagaaattaaacactactagtagctagctagggtgagaaaatgggtgaagctaaggaaatatggtctgcaccaataacccctagaacagcttcagtagtaggaacacctgttgtagcattccacctgtgtcatgtccaccctctcagcttcactcaccatctctaacaaggtcacctctacttcaccctgaggatggagatgcaccacgtcgtaaaacatctaagactccaaagactccaagaacccc

SEQ ID NO: 10549 - DNA, 256 bp, Glycine max
  Clone ID: 700966802H1
gctgtaagcaatgttctaccccttgttgcaacagcttttcggccaccgagtggagtgaagcttagatgtccacatgcaattgttgctgcaagggctgcccttgcccgtacaacctttgtgaaaaacatggccctcagcctcttcctgcaaaaatgcttgttattgcagcgttaggcatggcggttaatgtgccctttggcatgtggaaggagcataccaagaaattttcattatcttggtttgtagccgtgcatgc

SEQ ID NO: 10550 - DNA, 256 bp, Glycine max
  Clone ID: 700966803H1
gttcattcattcatattttccactccctctttcgccactctcgaaatccgtgcactgatactcagagacaaagatgaaagagagaaggaagtgaaacgcaggacagccttgccgtttttgaaaggccgtaaacgacgaagcaaaacgcgttcgtaacagaagaaagaaagaaaagagtaactgacaactgtaccagtagaaaaatcatcgacggtatgctcatgactgtcactgcttcgtcgtttatttttttgtt

SEQ ID NO: 10551 - DNA, 255 bp, Glycine max
  Clone ID: 700966804H1
atgatattgattttccaagaggtcatatagcacttaagagtttcaatgcagaggtagttgatgaagcagggaaccctgtgcctcttcatgaaacttatctccaccactgggttgttggaagatactataacctaaatatgtgacgacacacacaaactatgatggacataggatacttcacaactctgaccatatatttgtgaggaacagcggcatatgccagagagatattctaggacaatactatggccttgg

SEQ ID NO: 10552 - DNA, 256 bp, Glycine max
  Clone ID: 700966805H1
tgagaatggagtttcaagggttaccggaaggttgcattgctagtatactctctcgcactacgccggcggacgtgtgtaggttttccgtcgtatcaaagattttccgttcggccgctgaatcggacgctggtggaaacgttttctcccttccgattaccattccatcatttcccagtctccttcgcctctcaactatccttccaagaaggagctctatctcgctctctcggatcgccctatcatcatcgatcagggt

SEQ ID NO: 10553 - DNA, 261 bp, Glycine max
  Clone ID: 700966807H1
aagggcaaaattggagattaaaagggctgatggcaaagaagctaacattgctgaagaagtttttgagagaacaaaggaaaaattccgaatgtattaattgaatctctatgtttcctaagacattaggtatttacacctcaggaaatttgacttcatataaataagctcgatgctatggtgtatcctaaatcctaatgaataaattgtactgggagcatcaaaatgaaagttactttgtaatataagatggcattctgttat

SEQ ID NO: 10554 - DNA, 256 bp, Glycine max
  Clone ID: 700966808H1
ggcacaattggagattaaaagggatgatggcaaagaagctaacattgctgaagaagtttttgagagaacaaaggaaaaattccggatgtattaattgaatctctatgtttcctaagccattaggtatttaacctcaggaaatttgacttcatataaataagctcgatgatatggtgtatcctagatcctaatgaataaattgtactgggagcatcaaaatgaaagttactttgtaatataagatggcattctgtta

SEQ ID NO: 10555 - DNA, 253 bp, Glycine max
  Clone ID: 700966809H1
atcttgttgacatacatgttcctgatggaaaacattttactgtttgtggtgatgtgcatggtcagtactatgatcttctgaatatttttgagcttaatgggcttccttcagaagagaatccgtatctattaatggtgactttgtggataggggatccttttcattggaagttatcctcactttgtttgcatttaagtgcatgtctccatcagccatatatttagccagaggaaatcatgagagcaagagcatg

SEQ ID NO: 10556 - DNA, 255 bp, Glycine max
  Clone ID: 700966810H1
cacaagcacaagcacaagcacttctctaattccctttcacactctattacagatttcacaagtgcttacacttcaaatggctttggaagctcttcaatcacccaccacatccactccatcgtttattcctttgaagaaaccagtctcagttacttagagacaccgtggacgaaaggaaagcgttctaagcgtagcagcacggagcaacaactgcaacacccttcatgcaccgaggaagagtacctcactctttgt

SEQ ID NO: 10557 - DNA, 114 bp, Glycine max
  Clone ID: 700966811H1
aaaattaatcatcttacttatttattctccgaaaatggttgatttacattggaaatcaaagatgccaagttccgacatgccttccagaactctaaaactctctctctccgacaa

SEQ ID NO: 10558 - DNA, 253 bp, Glycine max
  Clone ID: 700966812H1
gagcaattcacggttgggatgcacaaaccccaacaacaacaacaacaacaacaacaacctcagcttcatcaaaacatgcgtatggactatgctgctgacggcactgctgttttcgcccctccgaccgtaccgttaacattaacggcggagattcctctccagcggtgcctccgggcctgggcctgccccagccccagcccatgatggttaactcccccgaaccaattaagagaaagaggggaaggcccaggaa

SEQ ID NO: 10559 - DNA, 141 bp, Glycine max
  Clone ID: 700966813H1
ggctcgagtggaaatcaaaaccgccaagacacgcaagggcaagcgggacctcgagaagcgcgcccccaagctcgtggaatcggggaagaagacgctgatcctgcacggaacgagaccagcggcgtgctgaacgccgtgctc

SEQ ID NO: 10560 - DNA, 261 bp, Glycine max
  Clone ID: 700966814H1
acgtcgagctcgagccgtggtagtaaagttagcgtacacgcaagtaactcccttccgtaattaacataaacacagaatccaagaggtattgcaactggaattccatggcgacgagtgggtcagagacaaagcaatgatggtgattggaatcgacgacagtgatttcagcacgtacgctctccaatggactctggatcacttgctatcccctgcaaatgttcctaagttcaagatttttcttgtttatgccaagccttctgt

SEQ ID NO: 10561 - DNA, 145 bp, Glycine max
  Clone ID: 700966815H1
attgggtggtccatcatggacaatagggttagggagaagagattcaaccactgcaagtaaagatgctgccactagtgatatcccatcccctctaatggatctcaatgatctcatatctgccttttcaacaaggggtttacctccc

SEQ ID NO: 10562 - DNA, 255 bp, Glycine max
  Clone ID: 700966816H1
gtaacactagaactcacaaaggacagaagaaacgcgaatgccaggagaactccaattaccacccgggttcagattccaccccactgacgatgagcttgtgaatcactacttgtgtagaaagtgtgctgcacaaaccattgctgttcccatcatcaaagaaatcgatttgtacaagtttgatccatggcagcttccagagatggctctttacggtgagaaagagtggtactttttctctcctcgagaccgaaaata

SEQ ID NO: 10563 - DNA, 255 bp, Glycine max
  Clone ID: 700966817H1
tgactgttgatttctttcggaagcttcctcaagatgttgataagggtggcaatcccacacattcaatttttgatagatataatgattcatatctaaggcgaattggaaccacaattttgtcatatgtcatatggtctgtgctacactgcggaattcaattcccaagtccatcgtctattgtcaagtgcgggaggcaaaacgaagtctacttgatcacttttttaccgagctaggcaaaatggagaccaagcgtct

SEQ ID NO: 10564 - DNA, 256 bp, Glycine max
  Clone ID: 700966818H1
ctctgcatctgactcctatagtttcctctgctaattccatatccccgttttccttcactcttgaaccccgattcatttccaccagcacaagaagcatggctgcaatatcaataccttctcacatgaaagcttggacatactctgagtatggaaaatccaaggaagttctcaagtttaatcagagtgtggctttgcctgaggtgaaggaagaccaggtcctcatcaaggtcgctgctgcttcccttaaccccattga

SEQ ID NO: 10565 - DNA, 255 bp, Glycine max
  Clone ID: 700966819H1
aggaagtgcaagagattatggttaccaaaagatataattcaagtttttaaagacaacaccggaactagtaaaattgaaatcatatgcctggattcctccatatctgacaaagaagaaacagtggaatgaatgaaaacgccttcatgaagatggaaaaccttaaaatacttattattagaaatgacaaattttccaaaggtcccaattattttccagaaggtttgagagtactggaatggcacagatatccttcaa

SEQ ID NO: 10566 - DNA, 254 bp, Glycine max
  Clone ID: 700966820H1
ctcagccatatccccatcgcaacttttctgaggaagttgctattcttgatggctactttggcaaacttggtgcaggaagcaatgcttatattttgggtggccaagacaaagcacagaactggcatgttactctgcttctgcagattctgtaactcaatgtgacaatgtttacactcttgagatgtgcatgactggcctggatagagagaaagcacaggttttctacaaagaacaatctgcttcagctgccatga

SEQ ID NO: 10567 - DNA, 255 bp, Glycine max
  Clone ID: 700966821H1
agagaagagggtagcaatattacaggaatggtttgaccgcgttgactcggagaaaagtggaagcataacagcggtgcagctaaagacagctcttgctgtgggcaacctggaatttccgctctcagtggtcagcaaatgatcaggatgtacgatttcgaccggaatggtactatgagctttcaagaatttgtttcactcaacaacttccttcttaaggttcaacatgcattttctgatctagagaggggtcgtggt

SEQ ID NO: 10568 - DNA, 68 bp, Glycine max
  Clone ID: 700966822H1
gctgtctctcccatcctttcgcattctcaatacccttttgatttgtgaaaggaaagcaaacatggttg

SEQ ID NO: 10569 - DNA, 255 bp, Glycine max
  Clone ID: 700966823H1
gaaagacacagccattgtttgtttactttccattgattgagcgaaagctttgttttttctgcgatcattttccattgggtggaagaaagtctcaacctttagtcgaaagagcaaggatctgagtgagtgagcgatcatgtgtggtggtgcgattatctccgacttcattccagcgggtcccgccggcggggcgcacgcgtgaccgccgacatcctgtggccgaatttgaggaagcggttctcgaagtcgctgctg

SEQ ID NO: 10570 - DNA, 255 bp, Glycine max
  Clone ID: 700966824H1
caaagggcactttgtttcccatgtgtggaatgaacttggcctttgatcgtgatctcataggagcagcaatgtactttggtctcatgggtgatggtcagcctattggacgctacgacgacatgtgggctgctggtgctgcaaggtaatctgtgatcacttgggattgggaatcaagactggtctgccctatatctatcacagcaaggccagcaacccatttgtgaacttgaagaaagagtacaaaggcatattctg

SEQ ID NO: 10571 - DNA, 255 bp, Glycine max
  Clone ID: 700966825H1
actcgagccgattcggctcgagtccatggccactttcttcacccaaacctccttcccctcccactctctctccaaaaccttcgatacccatttcgccccatccccgaaagtcaacgtatttgcgaacttgccggcgaggaggcacgtgggggttcgagtttcgaacgcgctgatcgaaccagacggagggaagctggtggagcttgtggtgagggataattcagaaagagacttgaagaagggtgaggctctttc

SEQ ID NO: 10572 - DNA, 253 bp, Glycine max
  Clone ID: 700966826H1
atccctagcatgaacaagccgaggaagatgtgctctggggtatttatggatggaaagttttatgttattggtggaattggtggaaaagattctaagcttcttacatgtggtgaggagtacaatataaaactagaacatggacagaaattcctaacatgtcccctggacgcagtgccaggggagctgaaatgcctgcaacagctgaggcgccacctctggttgccgttgtaaatgatgaattatatgctgctga

SEQ ID NO: 10573 - DNA, 253 bp, Glycine max
  Clone ID: 700966827H1
ggattatcttataggataataccaaattagaatgaaaattatcctgtgagaagtgaaattgtgattgtgaattgaatgaaggatgctcgaatttgagttattgatatggcttttgagtcgcactatgttttgttgctctgttccttcaaagaacaattgcagcagcatgtccgggtccatgcaatggaagcagtaatggcttgttgggatatagagcaatcattgcagagtctaacaggagtttcacctggag

SEQ ID NO: 10574 - DNA, 80 bp, Glycine max
  Clone ID: 700966828H1
atgaatttgaaaacagacccaggactagaaataatgagtcaacgttttcagtttttcaaaagaagtaaaaatgcagtgat

SEQ ID NO: 10575 - DNA, 253 bp, Glycine max
  Clone ID: 700966829H1
cagccagccgttagggaaatcaagcacagctcaatcattgaatcttagcataaacacatacagaagaaggaaaagtggcaccctgggaggagctgatattgaaggagggtttggaagaaaaagaatttgttttgagatatatatacatatatgtgcaagtgcataggaaattaacacaaaaagatgacatggtgcaatgactctgatgaggatagggttattgaatcaacgacgccaacaataactattactc

SEQ ID NO: 10576 - DNA, 253 bp, Glycine max
  Clone ID: 700966830H1
cctaattgaatccaagcaagcaagggaagtgggggtattatttgatcagaagtacaaagctcttcaaaacccaaacaacagctccacggaccacccctactgctctgctctgcaatggccgacgagaacctgttgatcagaagagatatcttgaagagtcttgcaaaccaaaatgtgtaaaaccattactggaataccaggcgtgcattaaaaggatacatggtgatgattctgggcagaaacactgcactgg

SEQ ID NO: 10577 - DNA, 244 bp, Glycine max
  Clone ID: 700966831H1
aacaccgaaagtacatgttttattatagggtacactagtgagctgctagttcttattcactaggaagttacaagacaatacaacaaacatgtagtcacagtttgtagtagctaacatcatagtgcatttacgccctgtcatctttgttttcagcaacaaccttaactctttcaaggcagagtgtaaggtccacacttgtaaccaacagggcgattagccaggttacaacgcttggggatggtga

SEQ ID NO: 10578 - DNA, 256 bp, Glycine max
  Clone ID: 700966833H1
gttgttgttttcagataaacacgtgactcactatctatctatcaatcgatatctccgagttcagccgaaccaaactccgaagctatggcagagctccaaaccaaggttgaacctgttacggtcccggcccggtggatcccgagccaccgctagctgaggctccgccgctcgagaagaaagcagtggcggtgccaccacctgttccggctgcggcagaggaaaccaaagctcttgttattgtggagaaggagaagga

SEQ ID NO: 10579 - DNA, 255 bp, Glycine max
  Clone ID: 700966834H1
atattaatttactgaacagtgacaagttaaaaccaacatactaaatgtacaatgtatgatatccacctaaatggttaaaagaatgacttctgtaacaatcccagttgcataggtaacttatgtgacatgatgcaacggattgatgtattaacagattagtgtggagctgtggacccttctttaacgtgttgctaccatatggctgtaattgttggtgtttcaccattttcttgagctgttgtgatactaagattc

SEQ ID NO: 10580 - DNA, 252 bp, Glycine max
  Clone ID: 700966835H1
tccaattgtaagatgcagtctagcatcgcagggttacaccgtcccgagtgttcttatatttgactgtttgattcattcatatcacatttatttcctttcttggtgctggtttggcttttgatctagctcatgtgtagctataatcatgtgtttcagtcatcctcagtttgtttattgaaaataagaaacgaaacttgctctttcaatatgtatttaggagaataaagttattttagaacatgaagtgcctgc

SEQ ID NO: 10581 - DNA, 189 bp, Glycine max
  Clone ID: 700966836H1
aaaacaccaattctccaccctctcattgaaaaaaaaacaaccaaacaaaaaaaatcaatcattttattttatttttctacgaaaatggttgatttacattggaaatcaaagatgcctagttccaaaaaccaaaactctctctctccgacaacaagtccttaccctctttgcaactacccttccgcacca

SEQ ID NO: 10582 - DNA, 254 bp, Glycine max
  Clone ID: 700966837H1
tgccactgccgctgcaggcatagcttccttgttttcttcttctattaacagtgtcaaatgtcttcgttcctccaagaactgctccattatagacccccttataaccacagtgccctcaaaccgtggcatgttgtgtcacacttggtggaacctttgtccattgggggtgccattaattcgcacaagttgtgggggcctagaatttctgctgctgttgcacaagaagaggctgttgttgtggctgatgatgaggt

SEQ ID NO: 10583 - DNA, 254 bp, Glycine max
  Clone ID: 700966838H1
agtcttcaatactgatgattattgctgcagagggacttatggaaaccctgcaacatgtttggcttcaaactactccaagatcttcaaacaagtgtgccctgcagcatatagttttgcacttgatgaccaacaagtctaataacttgttcaaaagcagactttgttgtgatattctgtggatcaaggaatcagacagcttgttcctatcaagacaagcaggttgtatgtaatcgaccaaataaagcctataaagc

SEQ ID NO: 10584 - DNA, 254 bp, Glycine max
  Clone ID: 700966839H1
caataacaacatgcgtggtccttcggcagattgggcccaggcccaggcccaaagaattgataacaatgatggaggacttttggggtctcttactggtgccaccttaaactacagaagcaatattgtttcggatcagcgagtcaaggttactaataattcggattttcatggagaaaaaggaccggaatgtgttgtggctgtacgaagcgaaggtatggtcgaatcgtggattaattgttcttctgattgagagc

SEQ ID NO: 10585 - DNA, 254 bp, Glycine max
  Clone ID: 700966840H1
tggaagttgtgctagagtctccaagggtggcaccacacagatgagatttcagcctcgtctcgggaggtaccttgcttcagcggcagagaatattgtgtctatttttgatgtggagacacaagtgtgtgatattcactaaagggacacacaaaaccggtggtttgtgtgtgttgggacccttctggggagttgctggcatctgtgagtgaggactctgtcagggtttggactcttggatcagggagtgatgggga

SEQ ID NO: 10586 - DNA, 251 bp, Glycine max
  Clone ID: 700966841H1
gaaaccccaatttcagtaagtatgtgaggttcaacactatgcaagccgttgtccttgatgtgctcttgattttccctgacctccttgaaagagggtttaatcccaaagatgggttgggattggatttataatgagtttggatagcactgtgtttttgttcctcttggtgtgcttgatttatggttcttcttcttgcttgctgggtcaaatccccagattacccattgttgctgaggcagctgataggcaag

SEQ ID NO: 10587 - DNA, 255 bp, Glycine max
  Clone ID: 700966842H1
aatcttcatcatgcacaagagctcttcagattccacgttgggcccgggtggcctggacctctcccaggccttcttcaggcccataaacaacgccgcccctccctccccgaccaagcgccacaacaagatctccgtcatcggcgccggcaacgtgggaatggccatcgcgcagaccatcctcactcaggacctcaccgacgagctcgtcctcgtcgacaccaactccgacaagctccgcggcgagatgctcgacct

SEQ ID NO: 10588 - DNA, 251 bp, Glycine max
  Clone ID: 700966843H1
atatcttccaagtgcaacaccgggaccattagttaagtatagagaagaagagttgaagattttaagaggagatggaacgggagagcgcaaggaacatgaaaggatctatgattatgatgtctacaagatttgggtaatccagatgaagatgtaaagcttgctcgtccagttcttggaggctccagcacctatccttatcctcgtagggttagaactggtagaaaagccaccaagaaagatcctaaaagcga

SEQ ID NO: 10589 - DNA, 252 bp, Glycine max
  Clone ID: 700966844H1
caacttcaccgtcttcttcctcgatcatgtctcacttcaagggcaagtaccatgatgagcttattgccaatgctgcttacattggcactcctggaaagggtattcttgctgctgatgagtcaacagggacaattggcaagcgtttggccagcatcagtgtagagaatgttgaatccaacaggcgtgctcttagggagctgcttttcaccgctcccggtgctcttaaatatctcagtggtgtcatcctctttg

SEQ ID NO: 10590 - DNA, 112 bp, Glycine max
  Clone ID: 700966845H1
ggcgatgactgcctccaaggatcgcgagaacttcgtctacatcgccaaactcgccgagcaggccgagcgttacgaagagatggtggaatcaatgaagaacgttgcgaatctc

SEQ ID NO: 10591 - DNA, 246 bp, Glycine max
  Clone ID: 700966846H1
gacatggctggcagcaaccaagtcaatctcaatgaatctaggagtgttgttcctttaaatacatgggtgcttatctccaatttcaagttgtcttacaagcttctcagacgtgacgatggaacgtcaatcgtgagttggcggagtatctcgataggaaggtccccgcaaacgcaattcccgttgaaggtgtgttttcaatcgatcacgttgatagaaacgcgggtttattctaccgtgtgtacttac

SEQ ID NO: 10592 - DNA, 250 bp, Glycine max
  Clone ID: 700966847H1
aaggaatcacacaagagaaattttgggtggatcttggtaatttaaatttggtccaaaaatagtaagaaaaaaaaaccatagttcatttaattttcatgtccttgctaacggtggcgcaccaaagtgggtcaggtgagtttatccggttcacggaaagtcatggcggtggtggcgatgacgtcagtggtgacggtgaacatggttgtggacatgatgatggaagtggtgctggaggttcactagggttgaa

SEQ ID NO: 10593 - DNA, 252 bp, Glycine max
  Clone ID: 700966848H1
gccaagggcttcgcaaggtgaagccttaccttgctatattgtcccttcagtttggctactcagggatgtatatcatcactatggtttctttcaagcatggcatgagtcattggatactctcagtgaccgtcatgtagttgctgctattataatagtcccttttgcacttgtccttgaaagaaaaataagaccaaagatgactcttcccatcttcctgaggatagtggcacttggtttccttgagccagtgct

SEQ ID NO: 10594 - DNA, 102 bp, Glycine max
  Clone ID: 700966849H1
agggtagaaggctttaaacttcttgtggtatatgtctggagttgctatattttaatttccatgctagacagaattgtggcattttgaaattttgcttaattt

SEQ ID NO: 10595 - DNA, 253 bp, Glycine max
  Clone ID: 700966850H1
cggatctagagtcttcagtttctcctcgttgttcttcgctttcctgttttcaatttcgattctttcgttaatttaataagatgtttgggagggcaccgaagaagagcgataatacgaggtactacgaatcctcggcgtctccaagaacgcttcgcaggatgatctgaagaaggcttacaagaaagccgccattaagaatcaccccgacaagggcggtgatcccgagaagtttaaagagctggcgcaagttatg

SEQ ID NO: 10596 - DNA, 253 bp, Glycine max
  Clone ID: 700966851H1
gcaatttggacctccaaaccaacctgaagtcagtattcttgactaccagtctcaacagcataagcttatgccaatgctggcttcaacttatgcttttcattttgccacgacaaatctagtggagaatactctcaaatgaaaaaaactcatgatgatgaattagttgcagatgtccatgccctttcggcaggtctaaaggcttatgtaacatcatacactgcaaagtcactcagcatctgtagggaagcctgtg

SEQ ID NO: 10597 - DNA, 253 bp, Glycine max
  Clone ID: 700966852H1
tcacaatctggacactgctcagattagaaccctaacctaacccaaccctctctctctctctcttcaattcatggacgccgtcgactcaaccccagatccccctcccctccctacctacgatccatcgagtatcacaacccgccgcaacatcaatcggaaaccgggcaaaacggtaacggcaccaacctcggaaaaccatcggagaacggcagtcaggtcgctgccgacaacaacggcttgaatcctcagattt

SEQ ID NO: 10598 - DNA, 253 bp, Glycine max
  Clone ID: 700966853H1
aagggtgttgtagtatagttagagatatcactactacaccaccctgcatagtttgttcagctataatactacttgagcttctttacctacttttcaaacctacattgcacacaaaatggcaacatctggtcatgttatctacttgcattgcttctttttatgtcaactattgtatcagagagtagagtggcaaggaaggacttgggcctggaccttggtgggttgggggttggacttggactgggtttgggcc

SEQ ID NO: 10599 - DNA, 255 bp, Glycine max
  Clone ID: 700966854H1
cggctcgagccttgcttcacttgtatgctttagtttctagcatcgatcactcctaattacttgctagcatttctctactccttgtgcttgacacttttgtcatttaaaatggaacttaattttaagtaccaacttagccttttctgtgtcacactgctcttacctgccctgtgtacctctcaagactcttttacgtgctccagagcaacctattatggtagcccagattgttatggaaatccaaggggagcttgt

SEQ ID NO: 10600 - DNA, 250 bp, Glycine max
  Clone ID: 700966855H1
cctctactaggggtgatggcttttggaagggatgttgtgctggattgtgctgttgctgtgccctggattgttgtctctgattgaagttatggatttgggcttatcctctctgtcctttgtcattttctttactaatttaattttgtacttgtctaataagggtatttgtgtcctccgagacagcaaaattttatttatgtatgtgatggaatttgtatcttgttgatctttttttaactttggataggga

SEQ ID NO: 10601 - DNA, 254 bp, Glycine max
  Clone ID: 700966856H1
gggaagccaaagcgaaaccctaaccctaacggagagatggcggacacttggcatcgatattcgggacggagaaggacagggtgaactgtccgttctacttcaagatcggcgcgtgcaggcacggcgccggtgctcccggcttcacacgaagcccacaattagcccaacgttggttctgtcgaacatgtaccagaggcccgacatgaacatgaacatcatcaccaaccccgatcagccccagccccaatctctcg

SEQ ID NO: 10602 - DNA, 252 bp, Glycine max
  Clone ID: 700966857H1
ccacaacccacaagtctttacgaggtccaagaggtggtatgatattcttcaagaaagatactgtgcatggggttgatttggagcctgccattaacaatgctgtttttcctggtctacaggggggtctcataaccacacaattggaggactagcagtttgcttgaagtatgctcagtctccagaatttaaaaattatcaaaatcaggtggttgctaactgtagagctcttgctaagcgattaattgagcatgg

SEQ ID NO: 10603 - DNA, 243 bp, Glycine max
  Clone ID: 700966858H1
attactagttagtgctgacaaattggtgctacttatgagtggtaagaacaattttgtgtttagaagttagcatagagtgaaataaacgaatgtccaagttgtgttcttgtgttttagtcttagaaggtatggtaacaggagaaaagcagtggatgtttttttcttttggttcgttaaggatgtaagttacgtcaacggcatttggtatatcttatctgttctcaaaatgattctttagtaagc

SEQ ID NO: 10604 - DNA, 252 bp, Glycine max
  Clone ID: 700966859H1
ctctccctctttcctatcacactttctagatagctagccaaccagagtaagatctaaagatatttcttatatatcctatggtccgagagtgcccttgttctgcgccaaccctttcttccacatctgcgtttcaacctcttcctctcttgagtccccttatcatcaaatacccttcttcttcaacctccaccaaattcaacccccacataacaaatctcctcccatcccatttttcagcaccaaagtttgaaa

SEQ ID NO: 10605 - DNA, 111 bp, Glycine max
  Clone ID: 700966860H1
gcgcgcaacatgtttctctcagacaagcatgttgatgttacctttcttctgttcctatttatgtttgaaattggatcatcttcagcagcacccgtttacaacgctaattac

SEQ ID NO: 10606 - DNA, 252 bp, Glycine max
  Clone ID: 700966861H1
atccatcgaaggcaaggaatggcgaagaagaacaagaagcaggcaacagagggcgaggtggaaccggaactcaacaccaacaatgacgacagcgatgattctcacaataagaagaaacttgagaaaagaataagaagatgaaaatacccacagttagcatagccgtgcctggttccatcattgacaacgttccaagtctcgagctcgctacccggttggctggtcagatcgctcgtgccgcaaccattttcc

SEQ ID NO: 10607 - DNA, 250 bp, Glycine max
  Clone ID: 700966863H1
tgtttgtgtagaagatgaaaagggaacagcaagagggatgccgagctttgattcacaattgcccaattccaatgcatgctatacagagggaagcgcaattgattctttttgtgtgtttgactttgatcaatcagttggatatcgcatagaggattgtgttgccttgaggggaaactcagtttttgactcactaaaagtaagtagccaaacaatttctcggggtcctgttgaagttgattcctttgataag

SEQ ID NO: 10608 - DNA, 250 bp, Glycine max
  Clone ID: 700966864H1
actcgagccgaatcggctcgagcaaaactttcatctttgtcatccaattaacccaggtgtaaaaatgtcagcagtgaacatgtccactatgagacttccaagagcttccttgtctggaacaacacagctaggagatcatgtgctcttacaaagagtccatcatctttgaggtctgtgaagaatgtgtctaaagtgtttggattgaaatcatcttcctttagagtgtcagcaatggcggtatataaagtga

SEQ ID NO: 10609 - DNA, 252 bp, Glycine max
  Clone ID: 700966865H1
ctgggacatcccaagctgactgtgctgttcttatcattgattcgaccactggtggttttgaagctggtatttccaaggatggacagactcgtgaacatgctctgctttcattcacccttggtgtgaacagatgatttgctgctgtaacaaaatggatgctactacacccaagtattccaaggccaggtatgatgaaattgtgaaggaagtctcttcctacttgaagaaagtaggatacaaccctgacaagat

SEQ ID NO: 10610 - DNA, 252 bp, Glycine max
  Clone ID: 700966866H1
gctgtatccacttttgcggcctttgttgggcaagttttagtgagaaagctggttgccatactagggagagcatcgctgatcatttttatcctctccagcaccatttttgtcagtgcaatatcactggtggtgtgggcatatcaaacatgatccaaagaattgcaaataaagagtacatggggtttgaaaacctttgtacctactcagcctagatattagaattcggattacaaattcaatttcaaggactat

SEQ ID NO: 10611 - DNA, 252 bp, Glycine max
  Clone ID: 700966867H1
accacacaattcctacacatttctactctttagtttctccaattttctttctcaattctcaacaatggccactacaacacaacttcacttaccccctggattcagattccatccaacagatgaagactcgtcatccactacctttgtcgcaaatgcgcttcgcaacatatcgcggttcccataatcgccgaaattgatctgtacaagtacgacccttgggaccttccaggaatggctttgtacggagagaaa

SEQ ID NO: 10612 - DNA, 252 bp, Glycine max
  Clone ID: 700966868H1
agctttcattgctcctagcaattcacaacaacccttcttttttagctttcacgaaactttccaacaatgaattcctcaaaggcatgcacccttttgaatttggtagcggttgttatgttcgttgcattttgattagccaaagtagggtggaggctagggttttatctcattcggaggaatttgcatttgcaagagctaataatctccaaacatacacctcatcagcctatgagcaagccaagaaaaccatgg

SEQ ID NO: 10613 - DNA, 118 bp, Glycine max
  Clone ID: 700966869H1
gaaaaagaaaaagaaaaagcatacaacgatggctatgaatggatcacctcgacggtgggacgtgagattagttttgacattttctctacttttaatctcagcctctgtttctgctctt

SEQ ID NO: 10614 - DNA, 254 bp, Glycine max
  Clone ID: 700966870H1
gagaaaaactcaaagtcatcatcatctaccatggcaaattctgtggcattttccgacgagattcctaacatgagcatgagcttccctttctcccctgctttctctagtagcatctttgacatgatgccaccaccaccaccttcctcatctcacgatcctaaagctcccaactttgctaatagcttcatggacttgctcgctgtccctgctgattattataccccttctttattcgactggtcccaaaacaccgc

SEQ ID NO: 10615 - DNA, 253 bp, Glycine max
  Clone ID: 700966871H1
gtcatcttctggtgtacctgcaagtattgcactttcagcttccaagtcaattcacaaagctcctacaattatatggacacatagttctgtggattctcctatcttacatcataagcatcacttttcaaaagaaagttctccaatccaactccagtggcagcgccaacctatccagtccaggctcctacatacagtcatcaaggtccttcagtcttcgaatcacaacctcctttctcctcaccaaatattaagg

SEQ ID NO: 10616 - DNA, 253 bp, Glycine max
  Clone ID: 700966872H1
ctttcatagctactacactactttatcactttcattctttaattgggttcaaagaagcttaattaattggttgcagagattgaaaattaggaaaatggtgagtgttgaagagattcgtaaggcacacgtgcggaaggccctgccaccgtgatggctattggcacggccactcctcccaactgcgtagaccagagtacctatcctgactattatttcaggatcaccaacagtgatcacatgaccgagctcaaag

SEQ ID NO: 10617 - DNA, 254 bp, Glycine max
  Clone ID: 700966873H1
cttgtatgtggctgcagatatgcaagccttaaattcggtcctcgaatcatttctgatcattggttgtttgttattctgtcaaatacattccaaaatctcttggaaattgcgagattcagtgcttatcctagcagcagattttgggttctgacccaattattcattttccccaactgggtcttgtggattttttgttggggttttaaatttcgtgttgctgggtttgaaagttatttcctttcttccccgtctgg

SEQ ID NO: 10618 - DNA, 251 bp, Glycine max
  Clone ID: 700966874H1
aggttgacttagcatttgcttatttataaatgtcattgtgtttggaataatggtaataattaaaacatgtggttgattacttacaatttcccaggtatatataaaatagaacaaaattaaaggatgggaatagtactacaagaatcagaacttttccctagtggtaaaagcttctctacacctgcactctattattaatttctcatgcatgctaaaatctagtgcgataaagaacaggccatgtgtgaggt

SEQ ID NO: 10619 - DNA, 252 bp, Glycine max
  Clone ID: 700966875H1
aatcgagccgaatcggctcgagcgagctcgaggttcaacagcatcttgcgatgctagctcctctgtgctgcaaaaagggtctgaaacttgttcagaaatctccttaccacagtacaagttgtctatgattctgtcccagttgtggataataatgaaggcgggaggtaatctcttagtaggtccaactctttgaaggataagaaaccatggaagaaaggtcaattatcacaccatcaggtttctgtacaatct

SEQ ID NO: 10620 - DNA, 104 bp, Glycine max
  Clone ID: 700966876H1
acgagagatttcgttgtgcttagaactgttagatcttattatcatcgttgtttgcactgaacaatgggggcaccgaaacctgtatagttacaatatttttgttg

SEQ ID NO: 10621 - DNA, 240 bp, Glycine max
  Clone ID: 700966877H1
actacattaatattcccttgggtttcattaattgtgacatttagctttttttattgaaccgtgtcaatggccgctactatgaaggctttagcttttgttgctttgcttgttaccattaatgcatagtgtgtgaaagtagagtggcgagaaaggaccttggattggaccttggtggggtgggaattggggtgggtgctggggttggactaggccttggtggtgggggtggtgctggttctg

SEQ ID NO: 10622 - DNA, 248 bp, Glycine max
  Clone ID: 700966878H1
aagaaatttaagtgaggagctagagaatgatgatgaagtctgctatgtgtgcagtggtggttgtagcacttcttcttctggcggaggtgggacccatggctgaggctgtgacatgcaccccacagagttgagtccgtgtcttccagcaatcacttccggtgctaaaccttccaatgcttgttgcacgaagctgaagcagcaaaaaccatgcttatgtggctacctcaaaaacgctagcttgaagcagt

SEQ ID NO: 10623 - DNA, 251 bp, Glycine max
  Clone ID: 700966879H1
tccaattgcaacatactaagtgggttggctggtttagatctgagcaacagcttttaattttctacttgcttgaattttattggaagccatggattgttcatcatggattaacacttccttggatctcaacattaatccccgcagagttcatgaagaagttcccgtaagtatagaaataaagatcgaataatattatatcattcttcttgcgagcactccctgaagctcttacgggaaatgctttcattcag

SEQ ID NO: 10624 - DNA, 250 bp, Glycine max
  Clone ID: 700966880H1
acagaatctactctctttttttctaccttagattccttctccaacaatggctctcgccgtttccactacttcttcctcttcagcagctgctgcagcttctagctccttcttctctcgtctcggacttcctccgacgcaaaagctcctcaaatcggttcgtttcggtttccggagaggtcgcttgtttcgtctgttgttgtcaatgtaactcaacgacgctccttggtgaggccactcaacgccgaaccgc

SEQ ID NO: 10625 - DNA, 251 bp, Glycine max
  Clone ID: 700966881H1
agaaaaccctgaaatgaggttcaacatatctttgtaccgaaataaagagtacaagccttctgatggtgatgactcttctgttccattggaggagttgctggctgatcttgatctgagtgagcacaagatgaagaggataacatgacggaatgaacaaaagcttcttctatcttgattagtattttaaggaattttggttttttgttcatgtcaaaggctcccccctcccatttatgttgtgttattttgca

SEQ ID NO: 10626 - DNA, 251 bp, Glycine max
  Clone ID: 700966882H1
ctttcactagctattacactttttgagggtttttttttttattctactatatatgggggcaagctcgggtatagtactagaaatcacagttatatcatgcgaaaaccttcgtgtcacggaggatccatacgttgtcgttagggctgagtcgttaaattgttgcacctcgaatatagcgaaggattgtgggagcaacaaaacgagtttgttttcgtggaacgagaagttgatgctgaacatgcccatgcatg

SEQ ID NO: 10627 - DNA, 251 bp, Glycine max
  Clone ID: 700966883H1
ctcgagccgcacaaacttcctctgaagcattccacttccatggccgatccaaactccaatcctaaccactctaacgctcacgtgaaccgttccagacactacaccactaacgtgaccttccgtccctctgtcacgcgtcgcgcgtgggcgccatcatcggcaagtccggcgtgctcatcaagtcgctccaggaggccaccggcgccaagatacggatcgtggacgcgccgccggactcccctgaccgagtc

SEQ ID NO: 10628 - DNA, 250 bp, Glycine max
  Clone ID: 700966884H1
caccttcgtaggagccttacctctctctctctctctctctctctctccattccgtagtatccctctgttcgacccttttacttagcattccctgtttccggtattcgctccctttttttttctgattctgtctggttttacttagatctctgtcccgcaccagatctggtgcagggtgagagggttgggttcattaattttgtatcaatcttccttctgagcggtacgcgtggggataccagagtctttt

SEQ ID NO: 10629 - DNA, 251 bp, Glycine max
  Clone ID: 700966885H1
caccttcgtaggagccttacctctctctctctctctctctctctctccattccgtagtatccctctgttcgacccttttacttagcattccctgtttccggtattcgctccctttttttttatgattctgtctggttttacttatatctctgtcccgcaccagatctggtgcagggtgagagggttgggttcattaattttgtatcaatcttccttctgagcggtaggcgtggggataccagagtcttttc

SEQ ID NO: 10630 - DNA, 251 bp, Glycine max
  Clone ID: 700966886H1
ccgatgaaggttgaagacttctttaggtacttattctcagatgatgctctaaattttcttgagtcttttcgccaaaagtgtggtgataaagactttaggtgttctccgtggcatcctcaagagaatttgggtatgctcgtgaactgtcatttcaacatccaataaaaatttatcttggagcgaaatttggtggctgccatgaggtccagaaatttcgtgattataggaacagtcatttggttatcgagacg

SEQ ID NO: 10631 - DNA, 250 bp, Glycine max
  Clone ID: 700966887H1
tgcttttctgttaagcaatcaaatttacaaacccccagagttcttctccccttacttcttcaagggtgctagttatgaatactatggaggagaaccaaaaggatcaaagtcatcatcacatgtatgggttatagttggtgcagtagttgctgttgtggtctttgttgtactggcattctttgcagggaggtatgcccttcgccagaaaacaagagcaagaagatcttcagagttgaacccttttgcaaat

SEQ ID NO: 10632 - DNA, 252 bp, Glycine max
  Clone ID: 700966888H1
agagaaacatttcactaatagagagacataagcataatattgagaaataatggagggttgtacttattgtgtgaagttgctatgccttgttgggtttgtggtgcttgtgagtactattgcaggggtggagagtgctggtgaatgtgggaaatctaccaccccagataatgaggcttataagcttgcaccatgtgcctcagcagcacaagatgagaatgctagtgtttctcagagttgctgtgctcaggtgaa

SEQ ID NO: 10633 - DNA, 250 bp, Glycine max
  Clone ID: 700966889H1
atctaatcactctagctgttgcaaatttctactatttttcaatggcttctgcagatgttgagttccgttgctttgttggtgggcttgcttgggtcaccggcaacgatgccctcgagaaagcctttcaatctacggcgacatcgttgaatcgaaggttatcaacgaccgtgagactggaaggtccagaggattcggatttgtgaccttcgcctcagagcagtcaatgaaagatgcgatcgcaggaatgaac

SEQ ID NO: 10634 - DNA, 247 bp, Glycine max
  Clone ID: 700966890H1
ggaagcctctcgccgacgacaatttcgccgccgatccttcttcctccgacgtcttcagctccgtccagcgccattccgaggaccgccgcctccggctactcaagtctcagatcgccgccgctgagcggctgctgcggaagccacaccgagcagatcgaagcggcattccgacaacgaggaggacggcgatgccgagcctgaagccgaggtgaagaaggcgaacagaagaagccgaagaagccgaagt

SEQ ID NO: 10635 - DNA, 248 bp, Glycine max
  Clone ID: 700966891H1
gctgatgcacccggcgaatcggagggttttccgcaaggacgaaagaggggttgtgagtgcagttcatctcttgaacccttcgttgcaggggttggataagaagtaccctgtttcgttgctcgtttgcttgttcattccaagagttgcaggaagcaaatggtggctgctggagcctgtgtatatacgcagaagcttgttgagatggatgttcccgggtcgaagaaattcttggagagcctcgggcgtgg

SEQ ID NO: 10636 - DNA, 245 bp, Glycine max
  Clone ID: 700966892H1
aactatatttcaaggggaactgctcatttccttacttgcaaagaacccgactatcaacagagtttatggaacatgatttcatctattatgtcagataaaaatatggaggacaatgatattgtgccggctccaaagcttatcgaagttgtcttccagaattgcagaggacaagtcgatcactgggttgagccatatctcagaattacagttgaacgcttgcatcacactgaaaaatcatatttgaa

SEQ ID NO: 10637 - DNA, 250 bp, Glycine max
  Clone ID: 700966893H1
ctttctctctctaaagctgaaacttcgcacagcaacaagacaagcactcagagtgcttcgaattcgtcactgatcacgtttctgcaatgcaccgcgtgggtagtgcaagtaacggaaacaattcaactcgccctcgtaaggagaagagattaacctatgtgttgaatgattctgatgactcaaagcattgtgcaggcataaattgtctggctctacttatgtctgcagcatctgatgggtctgattatct

SEQ ID NO: 10638 - DNA, 249 bp, Glycine max
  Clone ID: 700966895H1
ggcaagaaaaaccaagtccattttcttggccttcttactactatgctctttctcactgggggtagtggtagtagcccaagaggaggcaatagcaaaatccgaaagtgaagcattaggggaacagagaaaagagaaacacttgaaatcatcattggtggaggtggttcacatgatccttctccctctccccctacatattgcccacctcctccaccaaaaccactgagccggttggagaaagcaaaacgt

SEQ ID NO: 10639 - DNA, 250 bp, Glycine max
  Clone ID: 700966896H1
aaagtcatcaaccttctcaaccgcaccggccacgcccgcttccgccgctctccaccccaagcccaagcccaagcccaaacccaaacccaaacccaaacaagtcttcagcctcaaccagaaacccacaagggttcagtttagatttcgtgaagcccaccattctaaactcaaaacccagcaacaaagacgagactttgaccctctccaccacctcctcctcctccttcacgtcctccgtcaccaacgacgc

SEQ ID NO: 10640 - DNA, 264 bp, Glycine max
  Clone ID: 700967901H1
ctctgtctttcgcactttcattctctcttaaaaatctaaatcccttttggtcttcatctttccctctcacccaggtatggcttctatacgcatcctgaaggtgctcaaggacttgcagaaggatcctcctacgtcatgcagcgcaggtgccgtgagcgaagacatgtttcactggcaagccacaatcatgggacctgctgatagcccatatgcaggtggtgttttcttagtttcaattcattttcctcctgactatcccttcaa

SEQ ID NO: 10641 - DNA, 256 bp, Glycine max
  Clone ID: 700967902H1
tggaggagtctacataggtgtagagcagttggtgcagaactataggatgaagagggatttagtcaatggagctgttggcggatttgttgcaggtgcaactattctgggttacagaggaaggagcatcaaaactgcactttctgctggatcagcattggcattcacatctgcattccttgatttcggtgatcagacattaaaacatgatgctgggaaggagtatgcggcttacaccacaaagaaaagacccagtact

SEQ ID NO: 10642 - DNA, 252 bp, Glycine max
  Clone ID: 700967903H1
gagaagagtgcgtttgtttgtttgaaattaagtagtaaagatgtttggaatcatcggaggaaacaagggtcacaagataaaggggaacttggtgattatgcgaaagaatgtgttggatatcaacagcatcaccagtgttaagggtgtcattggaaccggcattaacatcattggaggtgtcgtcgacaccgttactgctttggcgtcccacatctccatccagctcatcagtgccaccaaggctgatggaca

SEQ ID NO: 10643 - DNA, 250 bp, Glycine max
  Clone ID: 700967904H1
agtcagcctcttcttgtttctcctgcaatcaacgacacccccccaaaaatgacaggagagacagtgaacccaaaagcttaccctttggccgatgcgcaactcgcaataacaatactggatcttgtgcaacaagctgccaactacaagcaactcaaaaagggtgctaatgaagcgaccaagacactgaacagaggcatctctgagttcgttgtgatggccgcggacactgagcctcttgagattcttctcc

SEQ ID NO: 10644 - DNA, 251 bp, Glycine max
  Clone ID: 700967905H1
gagagtggtttcagtgagtgatcggtgttcacttgatccttcataagtcgtcatcatcatcatcatcatcaccgttgattgaagaagatgccgatcagaaacatcgccatcggaaggcctgaagaggctactcaccccgacacgttgaaggcggggttggctgagttcatctccaccttgatcttcgtgttcgccggttcaggttccggcatcgcctacaacaagctcaccgacaacggcgccgccactcc

SEQ ID NO: 10645 - DNA, 252 bp, Glycine max
  Clone ID: 700967906H1
ctcgcttggttgcagcttcagcagcagcggcaagcaactccatccgcaatgggaatcgatttgaaggcaggaggtaagtccaagaagaccaaacgtacagcccccaaatccaatgatatttacctcaagctcctcgtcaagctgtaccgttttcttgttcggaggactggtagtaacttcaatgccgtcatcctcaaacgccttttcatgagcaaggtcaacaagcccccgctatccctctctagattgatt

SEQ ID NO: 10646 - DNA, 253 bp, Glycine max
  Clone ID: 700967907H1
gagagaaactgagagaaattcgcaaaccctaatttcggaaagatcggcgatggctgcctccaaggatcgcgagatcttcgtctacatcgccaagctcgccgaacaggccgagcgatacgaagagatggtggaatcaatgaagaacgttgcgaatctcgacgttgaactgactgtggaggagcggaatttactttctgttgggtacaagaatgtgattggtgctcggagacatcgtggaggatcctgtcttcca

SEQ ID NO: 10647 - DNA, 255 bp, Glycine max
  Clone ID: 700967908H1
ggggggtatacatatacttttgagggtggcttccctggtggtggatttggagggggctttcctggcggtggcggcggtggatttgagttccatttttgattgagaaagccgcatgcactccccatatatatatatatatatttaattttctgaagggaccacaacaattatatttgactaatcacttgctaacggttgttgagataaatacgtaggccatccccggatgcttgtaagataagaaacgtgctctag

SEQ ID NO: 10648 - DNA, 263 bp, Glycine max
  Clone ID: 700967909H1
cccaattcctaattgtttaaacctaattctcatttcttcatcgttcgattcttctcctcctaaagatgcagatcttcgtgaaaactttgaccggtaagaccatcacccttgaggtggagtcctccgacaccatcgataacgtgaaagctaagattcaagacaaggaagggatcccacctgaccagcagagacttatctttgcgggtaaacagcttgaggatggtcgaacccttgccgactacaacatccaaaaggaatccact

SEQ ID NO: 10649 - DNA, 258 bp, Glycine max
  Clone ID: 700967910H1
taacgatctgaggaagacaccaagcttctctccacgcccttcttgggtaatctgaagtgcagcgatggcggatggattgcactcgcggcatccatcagtagttcagaagttatctggacagtcttatttgttgtctaggcttgcccctactcactcaagaaactattccacaactggtagttacttcaatggaggcttgcagtcttcgggtttggttccagtcatggcacatgcaccggctgagaaaggagtgtctgg

SEQ ID NO: 10650 - DNA, 255 bp, Glycine max
  Clone ID: 700967911H1
gatattttggggtggacaggggcccaacgacaaggggctctcccgcaagcacgtcgttgagggaaccaaggcctccttgaaacgcctcgacatggaatacgtggatgttctctactgtcaccgcccggattcctctactcccatagaggaaaccgtgagggccatgaaccatgttattgataggggctgggccttctactggggcactagcgagtggtcggctcagcagatcaccgaggcgtgggctgtggctca

SEQ ID NO: 10651 - DNA, 258 bp, Glycine max
  Clone ID: 700967912H1
gtttgttccatctcttgcttcttgcttctattacttgcttctttcttcaccatgtcacttgctgggaaaatcaccactgaaattggggttcatgcaaccgctgcaaagtggttcaacctctttgcaacacaacttcatcatgttcaaaaccttactgatagagtacatggaaccaagctgcatataggtgaagactggcatcacaacgagacagtcaaacactggacttataccatagatggtaaggctacaacatgt

SEQ ID NO: 10652 - DNA, 258 bp, Glycine max
  Clone ID: 700967913H1
gcaaagatggtgaatatatcctaataattgagaccacaacttgtagagtattaaggtattggctagaaacaccaaaaactggaaccttggaagtctttgctgatctaccaggtttcccagacaacatcaaacggagtccaagaggaggattttgggtgggaatttactcaagaagagaaaaaattatccaatggattctatcatatccttggattggaaaagttttgcttaggcttcctttggacatcccaaaagctt

SEQ ID NO: 10653 - DNA, 259 bp, Glycine max
  Clone ID: 700967914H1
cggcaacggatatctcggctcttgcatcgatgaagaacgtagcgaaatgcgatacttggtgtgaattgcagaatcccgtgaaccatcgagtctttgaacgcaagttgcgcccgaagccattaggccgagggcacgcctgcctggctgtcacaaaagaatgatattaaatattttaaaagtccaagttattgtgtagttggaggcagatgcccaggctgtaatttccgttatataattgtattcttacttggtagttcat

SEQ ID NO: 10654 - DNA, 260 bp, Glycine max
  Clone ID: 700967915H1
cgcagagagaaattgagtttctgagataaccacttttctctttgattcatcaatggcaaccgcgaggaccgtgaaggatgtttcgcctcacgatttcgtgaaggcttacgcctcccatctcaagcgttccggcaagatggagcttcctgagtggactgatattgtaaaaacagcaaaatttaaggaattggctccatatgatcctgactggtattatgttagggctgcctcaatggcaagaaagatttatttgagaggcg

SEQ ID NO: 10655 - DNA, 265 bp, Glycine max
  Clone ID: 700967916H1
ctcatttcaatttgcatttgcatttcatttggcgttttgtttctttctggaagcttcacttcggcatccatggcgtcgttcgaagaagctcctcccggaaactccaagaacggcgagaagatcttcaagaccaagtgcgctcagtgccacaccgtggacaaaggtgccggtcacaaacaaggacccaatctgaatggtttgtttggaaggcaatctggcacaactcctggatattcctattctactgctaacaaaaacatggctg

SEQ ID NO: 10656 - DNA, 285 bp, Glycine max
  Clone ID: 700967917H1
cacgcgaacgcgagcattcggctcgagcgtaaacacagtgcaggggctcaattatggagaaagcaattcaaagacagagagttctgcttgaacatcttcaacccatttcttcaagttcaaatttttcctctcaaacccatcaatctacggatctctcagcttcattatgttttgctgggaattcttcgcatggtcaaacaggtggatcagatgatgacgtggtgattgtagctgcatatcgtactgccatctgcaaagcaaagcgtgggggctttaaggataccc

SEQ ID NO: 10657 - DNA, 254 bp, Glycine max
  Clone ID: 700967918H1
aaacactcttcttcatattcttcttcttcttcttgttcttgttctatctgtgacgagcatcatggcctcgagagcagtgctattgttggctatgtgtgtgcttccggccatggttgtggccattcgcccagcaaagaaccctttttgcgtgaagggtcgcgtctactgtgacccttgccgtgctggttttgagacctcagcaaccacctacattgccggtgctgagattatgttgcaatgcaagagcagggtta

SEQ ID NO: 10658 - DNA, 252 bp, Glycine max
  Clone ID: 700967919H1
ttttcttctcttcactctgcccgctgcatcaatggcttcagagaagaaactttcgaacccaatgagggagataaaagtgcagaagctcgtcctcaatatctctgttggcgagagtggagatcgtctcaccagagcctccaaggtgttggaacaacttagtggccaaaccccagtgttttccaaagcaaggtacactgttcgttcctttgggattagaagaaatgagaagattgcatgctatgtcactgtcag

SEQ ID NO: 10659 - DNA, 250 bp, Glycine max
  Clone ID: 700967920H1
ctgagaggaagagggagtgagagagagtgttcttcgtttgctaccttctcccagaaatggttacgttcaggtttcaccagtaccaggtggtcgggagggctctcccaacggaagcagatcagcatccgaagatctaccgaatgaagctctgggccaccaacgaggttcgcgccaagtctaagttctggtattttttgaggaagctgaagaaggtgaagaagagcaatggtcaagttcttgctatcaacga

SEQ ID NO: 10660 - DNA, 249 bp, Glycine max
  Clone ID: 700967921H1
tcaatcttctgagagtgtttggttgaaagtagcaaagatgtttcctttcgggcaaaagggtcaaaagataaaggggactatggtggttatgcagaagtatgtgttggatatcaacagcatcaccagtgttggagggatcgttgaccaaggcttaggcttcataggcagtgcagtcgatgcacttacttttgcagccaccaaaatctccatccagttgattagtgctaccaaggctgatggtgggaaagg

SEQ ID NO: 10661 - DNA, 252 bp, Glycine max
  Clone ID: 700967922H1
ggggtcgttaatccagatttccccctgtacataaagcacgaagacctctccgaaatcgcacacggtggtcaatgtcttagcatatcagtgttacagttgtggattctgcatctcactgaaacatgtatgcgagcggggaattctgatatctatggattcctcgagccatagtccattcagaggtatgggcaatcgcagtttgaatctgaaagttacataaagagttggatgcagagttcacaacgcgatgta

SEQ ID NO: 10662 - DNA, 252 bp, Glycine max
  Clone ID: 700967923H1
gtttgctggaaatggagttcaagtctcacctgttactccatctgctgatgttactgcttacttcagctctgagcattcgagcagctcgtttgattattctgacctcggatggggtgaacaagtccccaagacacccgagatctcatccatgctttctgctgctcctttggacggtgaatctcagtttgtgcagggtgctgctgatcagaatcagaagaagaacaacctgctggatatggcatctgtgcaaga

SEQ ID NO: 10663 - DNA, 258 bp, Glycine max
  Clone ID: 700967924H1
aaaggatatttatctatggcgatttgcaagttgaaatctttgctttctctttcgaaatgcaactctgcgttggtctcctcttcaatacgcgctttctcttcggcacaggttccccctaatcacttgcggaatgttggattcattgggcttggaaatatgggatcacgaatggcaaataatctgatcaaagctggattcagactcacagttcatgacctaaactctgatgttctcgagatgttctctcaaatgggagtt

SEQ ID NO: 10664 - DNA, 248 bp, Glycine max
  Clone ID: 700967925H1
gagccgattcggctcgagagcatatctcatttgaatacattccttgtaagtttatacagttagatgggtttgaagatggcgttactgatcctaggcctttccctcatgctccttttggtctcctctgaggtggcatccacgaatacaaaagaggaggcaaatggagtggatgatgccaaatatcccggtggaagctatggagggggttacccaggtcatggcggtggcggttatcctggccatggcgg

SEQ ID NO: 10665 - DNA, 258 bp, Glycine max
  Clone ID: 700967926H1
gttagaaacaaggagaaagaaagaagatggcaggaaagaaaatcccagatgtgttgctgaattcaggacacaaaatgccagttataggcatgggaacttcagtggagaatcgtccatcaaatgagacccttgcttctatctatgttgaagccattgaggtgggttaccgtcattttgacactgctgcagtgtatggaacagaggaagccataggcctagccgtggccaaagccatagacaaaggccttataaagagta

SEQ ID NO: 10666 - DNA, 254 bp, Glycine max
  Clone ID: 700967927H1
gtttgttgtaggaagaggaatcttgagaaatggcaggggacagcaagagcaagattctgttcatcggagggactggttacatcggaaaattcatcgtggaagccagcgccaaagctggccacccaactttccttttggtgagggagtccactctctccaaccccgcaaaatcacccctcatcgacaatttcaaaggcctcggtgtcaatcttgttttaggagatctatacgatcaccaagtttggtgagtgcta

SEQ ID NO: 10667 - DNA, 258 bp, Glycine max
  Clone ID: 700967928H1
agagaaagagagagagagaaagacccttacccttctctatcgctcgctttcctttgacgcttctgacccttgctttgtctgcgtcttccttctttctttctttctttctctgtgtgtcgtaatggctctcccagactcttcttcccgtcgcaactccctgatcccctccttcatctactcctcttcctccaaaacgctccctctccaccacatgctcaacaccgcctccgctgccgccgccgccgctccctccccgcc

SEQ ID NO: 10668 - DNA, 253 bp, Glycine max
  Clone ID: 700967929H1
gtgggacacaactgaatacttcaaaattcaaattaggcctccttctctgtgcagcttccaccaaatgaatcgccttcttcttgttcgtcaccctctactagctttatccaagctaccaccactatcacccttttcccaaacctattattattcatacacacccacacggataaattctcaaatatataagattaaggtccctcctcgcacaatcgatgcattttgcactaccaacaaagagttgtcatctaag

SEQ ID NO: 10669 - DNA, 257 bp, Glycine max
  Clone ID: 700967930H1
ccgcaccagtttcaccgcacgaatatcttgttgtttggagcgatccgagaaaaactctgtaaacatgttggtttaccaggacctccttacaggtgatgagcttctctctgactccttccgttacaaggaaattgagaatggaatgctgtgggaagttgaggggaagtgggttgttaaaggagcagttgatgtagacattggtgcaaacccttctgctgagggtggaggagaagatgaggagttgatgatgcagctgt

SEQ ID NO: 10670 - DNA, 257 bp, Glycine max
  Clone ID: 700967931H1
tgtggtgacaagaagggcaagggaacatctctgttctagtttgcgaattaggattcgcagctttttatgtttcagcaatgttggaatcttttagtttctctctggatttttctgcccagttatattttattattttgcaataccctcgtgattgagaaattaaaactatttttgctaatttcaacgattgcaatcttaatctatttttatgctttgatactaaaaaaaaaaaaaaaaaaagagaaatcaataaataa

SEQ ID NO: 10671 - DNA, 267 bp, Glycine max
  Clone ID: 700967932H1
atcgacggccgcatgacagtcacgcagctcgctgccgccggtggtcccggcggcggtgacgtgtcgctccgcaaggtcttcgtcgggaacgtccccttcgagatttcctcggagaggctcctcgacgagttcctcaagttcgcgtgaagtcgaggaagggcctctagggtttgacaaatcgagtggcaaaagcagaggctttgccttcttcgtttacaagaccgaggaaggtgcaagggcttcgttggttgaacctttgaaaactat

SEQ ID NO: 10672 - DNA, 258 bp, Glycine max
  Clone ID: 700967933H1
gaggaaggaagatgagtttgagggcatcagagatagcgaagaagttgaatctgcaacctcacccagaaggtgggttttacgtggagacattccgagaccattccgtccagctttcgacctctcagctcccccccgaatacaaagtggatcgccctgtatcgacctccatctattttctcgttccttctgggagtgtgtctcgcctccatcgcataccctgcgccgaaacctggcatcattacatcggcgaccctctca

SEQ ID NO: 10673 - DNA, 249 bp, Glycine max
  Clone ID: 700967934H1
aagctagctaggttgaaaatagtttggttttgtagtaagtgaggtgaggtgccaaaatggtgaagataactcttggtactttcgatgactcttttggtgttgcctctcttaaggcttatttggcagagttccatgcaactctgattttcgtgttcgtgggtgttggttcagccatcgcttacaacgagcttacaaaagatgcagccttggatccaacggggctggtggcagtgctgtggcccatgcatt

SEQ ID NO: 10674 - DNA, 251 bp, Glycine max
  Clone ID: 700967935H1
tcgaaatctaagaagtctgctctgaatttatctgagagctgaagagagggaacgagtttgtgaagtaaagttgactcagtggaaactcggttgaactcgaaatggcgaaacttgaagcgaagctaggaatgatcgtggactcggtggggcagttcttctccggcaaagaccatcttccttattgtgactctgacgtcgtcgctggatgtgaaagagaggtattggaggctgaaaaacaatcatctgaagag

SEQ ID NO: 10675 - DNA, 247 bp, Glycine max
  Clone ID: 700967936H1
cttgttacattttttggtcttcaatattctgtaacgagatttttgccaaccttccgtgttactcgaaagagacacatcaaatgaaacagtcgtgttttgtagtcaattactttggcacgttttgacaatttgtatcaaagtacgattggaattttttcagaaaaagatcacttcaacgtgtatatacttgtggactagcataaattgttgacaagaggtgtcaggagtgccagtctcttttgtgttg

SEQ ID NO: 10676 - DNA, 247 bp, Glycine max
  Clone ID: 700967937H1
atccgttttctcttctcagccaggtcgttgagatgcacctaaaccccttattgctgagttcgaattcgctgcttgttcatagtttctttctttgattagttatcttcaaatacaaaagacggattgagggaagtcctcgttgtatttattctcctctagatcacagattaaatcaatggagttggacttaacaccgaagacggcagaagcattgtttgagggagatggtggaggtactacacttggt

SEQ ID NO: 10677 - DNA, 250 bp, Glycine max
  Clone ID: 700967938H1
ttgttctcttctcactctcactacacacaacaatcacaaccaacatcatcaacaacaacgtatagagtactgtgttttcacaaactgcgaaagcgcacgcagagaaagtagaagtagaagaagaagcacaatgaaggtgctgtctccaaaattgttcactctcagtattctgctcgcggcgctggttttagcttccgccaacgcagtcagcggcaatgagatgcagaaacatgaagccacggaatcaagg

SEQ ID NO: 10678 - DNA, 247 bp, Glycine max
  Clone ID: 700967939H1
accacttgccatggcagcagcagcgtcaatgtgtatgagcttcaacctggcaacagcattcaagggtctctctttttcttcttcttcctcatcgttcttcgctggaagtggtagttattctctccgcgcgggtcccacctcggtggtgtcgctgccccggcgctgcccgctgaccatagagaacgcccacaagaagggggcgggcagcaccaagaacggccgcgactcgcaggcaacgtctcggagt

SEQ ID NO: 10679 - DNA, 253 bp, Glycine max
  Clone ID: 700967940H1
gataactagaaacagtgtgatgaaaatgaaggtccttgttttcttcgttgctacaattttggtagcatggcaatgccatgcgtacgatatgttccctctccgaatgaacactggctatggtgcccgtactccggaggtgaaatgcgcaagttggaggcttgctgtggaagcacacaacatctttggctttgagaccattcctgaagagtgcgttgaagcaacaaaggaatacatcatggcgaacaatatagat

SEQ ID NO: 10680 - DNA, 260 bp, Glycine max
  Clone ID: 700967941H1
tacctttctctctcgctcgcaaacgcaaataataaaaaacaaggttttagccatggcatcgaagcggatcttgaaggaactcaaggatctccaaaaggatcctcctacctcatgcagcgccggtcctgttgctgaagacatgtttcactggcaagcaacaattatgggtcctccagacagtccttatgctggaggtgttttcctagtcactattcatttccctccagattatccctttaagccacccaaggttgcattca

SEQ ID NO: 10681 - DNA, 254 bp, Glycine max
  Clone ID: 700967942H1
tatcgagccgattcggctcgagccccaatcgtagccgtcgcactatgcgttttctgcgtcatctccgattccccgacaatgcccacccaaatgagcaagaagagaaagttcgtagctgatggagtgttcttcgctgaactgaacgaggttctgacaagggagttagccgaggacggatactccggcgtggaagttagggttacgccgatgcgcaccgaaatcatcatcagagccaccagaacccaagccgttct

SEQ ID NO: 10682 - DNA, 250 bp, Glycine max
  Clone ID: 700967943H1
cggggtagggtattggggttgtgctggcgagaaaccatgtgatgatcttgatgcttgctgcatggcccatgacaactgcgttgacaaattcggaatgactcatgtgaaatgccataagagattaaagaattgcctaaccagggaactgaaatctggtaaggttggattttccaaggagtgtccctacagcagagctgcacctacgatgataagaggcatggacttggccatcttgctcagccattgggtg

SEQ ID NO: 10683 - DNA, 258 bp, Glycine max
  Clone ID: 700967945H1
gattttgattcgattcgattcgattcagtcgaggttttaagcagcagcaagatgtctgggcgtggaaagggaggaaagggattgggaaaaggaggagcaaaacgacatcgtaaggtgctccgcgacaacattcagggaattacgaagccagcgattcgtcgtttggctcgcaggggtggcgtgaagcgtatcagcggtttgatctacgaggagactcgcggtgttctcaagatcttcttggagaatgtcatccgtgac

SEQ ID NO: 10684 - DNA, 259 bp, Glycine max
  Clone ID: 700967946H1
ctgcctcagcgttgaacactgttccatgctgttaaagcctccgttcacactctcacaccgattcaatttcagattttcctgtcaaactcgcattttccgggcacgaaactcgaggaattcgcgcatggcgcctcccatcctctccctcgctcttccctcaaacaccggtcgagttctcagcattcaatctcacaccgttcaggggtatgttggtaataaatccgctgtcttccctctgcaattactgggatatgatgtg

SEQ ID NO: 10685 - DNA, 256 bp, Glycine max
  Clone ID: 700967947H1
attcttttaaaccttagtctcccacggaagacttcaacagaagaaaaaggaagaattaatatcactcttccatggttgccgacgaagcttcaccattcgagaccagcgatatgctggcaacgctcctggcgtcgacgccgctgttgtcagagtcatggcggctgtgcaccaccgttgccgccaccgcgccgaggagtttcatgactgagcagcacggtggcggcggtgtggtgtacgtcgcttccccggcgtagaa

SEQ ID NO: 10686 - DNA, 264 bp, Glycine max
  Clone ID: 700967948H1
gccacttcgaaaccaaattttcttcgttcgtccttctgtgatctcttcttccaccatgagcaggtcagggcaaccaccggatttgaagaagtacatggataagaagcttcagatcaagctgaacgcaaatcgcatggttgttggtactctccgtggctttgaccagtttatgaatttagttgttgacaacactgtggaagtgaatggcaatgagaaaaatgacatagggatggtggtaattagaggaaatagtgtggtcactgt

SEQ ID NO: 10687 - DNA, 255 bp, Glycine max
  Clone ID: 700967949H1
acctttccttttttcccacagaaaaaaacaccacctttctttttccgactaaaggttcgccggaaaatgcctctatcctcctcttcctcctccgccgtagactccgccgtctccggcgagatcatgctctttggcgttagagtcgtggtggactccatgcggaagagtgtgagtatgaacaacctctcgcagtacgagcttcctcgcgacgctgccaacgccaaagacgacgccgcagatacgcctccgccgatg

SEQ ID NO: 10688 - DNA, 250 bp, Glycine max
  Clone ID: 700967950H1
cccttcttcatctctctttgatacccttttgttctttttggtgctttaatttgcactagcaagggggttggttttatttctgtttgcttgcaacaatggctgtggctaataagttactttctgttttgatcattgccctcattgccatttccatgcttcaaacagtggttatggcatctcatggacatggaggccaccactacaatgacaagaaaaaatatggacctggcagtctcaaaagcttccaatg

SEQ ID NO: 10689 - DNA, 248 bp, Glycine max
  Clone ID: 700967951H1
gggtcattgcccatctatacccattcttgaagggtctcttgggcaggcaaaatcgtaccccaaccattgttattgtttggtccgttcttcttgcttcaatattctccttgctgtgggtgaggattgatcccttcacctctgactccaacaaattaaccaatggtcaatgtggcatcaactgttagttctcttgtatgattcattttgtgttgttattcccttttgcttggagatacacaaggttgctg

SEQ ID NO: 10690 - DNA, 241 bp, Glycine max
  Clone ID: 700967952H1
ctcccttcaagatgcagatcttcgtcaagaccctcaccggcaagaccatcacccttgaggtggaaagctctgacaccatcgacaacgtcaaggccaagatccaggacaaggaaggaatccccccggaccagcaacgtctcattttcgccggaaagcaacttgaggacggccgtacccttgctgactacaacattcagaaggagagtactcttcacctcgtcctccgtctccgtggtggcat

SEQ ID NO: 10691 - DNA, 249 bp, Glycine max
  Clone ID: 700967953H1
cattgtgtttctctctttccgcggcgtagatctgagcagtttgggaaaccctaactgctctcaccactctctttgctttttttcctctccgatcaacgacctctttcgtcgccctaagtcatggcaggacttgcacccgagggatcacagtttgatgctcgtcaatatgataccaagatgaatgagttgcttacatctgatggacaggatttttttcacatcttatgatgaggtttatgacagttttga

SEQ ID NO: 10692 - DNA, 252 bp, Glycine max
  Clone ID: 700967954H1
gtgatgagcctgaaaagcagcaagaggagaatgaggaatggtttcatgtgccactctgaggcatcaactgcagtgtgcattgctgggtctgtggttgtgcctaggacaaggagtaggaggcatcagagaagtgtttctcttgatggtacaaggttgatcaactatgccaagtactccaaacttgttgactccagcactagcagcaggttcaattcagctcacaagaaatgtgactctgactctgtctctgta

SEQ ID NO: 10693 - DNA, 242 bp, Glycine max
  Clone ID: 700967955H1
atttgcaattatcttgggttgcaatggagggagtgttgcttcccgtgtgtccttcaccttcttcttgctctgcaactcctaaacccagaatccccattccgctacgctcttctttcccttctccattattacacaaccgtttcttctcccaaaacgcagcgttttcccttcgcaactctctccgcacttccaccttcgcactcgcgcaacacgaagctcccgttctgggcaaaccgataaca

SEQ ID NO: 10694 - DNA, 254 bp, Glycine max
  Clone ID: 700967956H1
cagaaacgaaaaagggttcggtgttctgttcgcgatgagagccaagtggaagaagaagcgtatgaggaggttgaagaggaagcgccgaaagatgagacagagatccaagtagtgcgttaaacctagtttgtttctgttgcttttacaattgcttatgttgtcgaatgggacacccagttgttagtggcactggtttctcctttttgatgtttgatacattttgttggattcaagtagtttatgttcgtcttatg

SEQ ID NO: 10695 - DNA, 256 bp, Glycine max
  Clone ID: 700967957H1
atcaggctcaggatggggggaaaattgaggaagagcatcgagaggaaaattatgcaggagataatgcctctagtgctgtagacaataaatcacaagacgacacctcggatgaaagttccaagacagaagaagaatctgacaaaaaggaaaagaatgagtttgagtctcagaaaaatggtactgaaactacagaagtggctgattctactgtcacaacaacaaacagccaaggaaatgaaaatcagacacagtcaga

SEQ ID NO: 10696 - DNA, 252 bp, Glycine max
  Clone ID: 700967958H1
attttgacacggatttccctttcaacattcctgaatttttctcttcataagaacttccctgcagttccacgtagatagttaaagagagagtaagaactaagaacagcatagccatagtctgttccggattaactggtgagtcgtagatcctgactatggaagggtaatcataagtcatgttgataaatcaagacaatgaaacatccctgtcatgcaagtttggagagttttcctgtatgtaatgtaccttca

SEQ ID NO: 10697 - DNA, 252 bp, Glycine max
  Clone ID: 700967959H1
tcaaaatccagtgcaaagggaagcaagaagaagcgttaatcattggcaaattagtgcatttgcaatcagacactttggaggctagatcatgatattattctgatggtggtcagtttttacatagttgttggacctttttgaatgaatggttaaatgagttagtgagagaacaaattaatttcttgacggcatagcctaaacagttgtttttggttctcactggacggaatgtatcttttagctagcaaaata

SEQ ID NO: 10698 - DNA, 256 bp, Glycine max
  Clone ID: 700967960H1
cgcagagtagagcagcacagaagagggaaaacggcaccgccgccgtagaagaaaacaaccatggtgcacgtctccttttacaggaactatgggaagacattcaagaagccgcgtcgtccgtacgagaaggagcgtctcgacgcggagttgaagctggttggtgagtacgggcttcggtgcaagagagagctgtggagggtgcagtacgcgctcagccgcatccgcaacaacgcgcggaacctcctcaccctcgacg

SEQ ID NO: 10699 - DNA, 254 bp, Glycine max
  Clone ID: 700967961H1
tatttgtagtcagggatgctgtgatttgttactgttggaatttgtacgtcattccagacacttcacatatattataggttgtgctttgttactataaaaaaaaagctagtttatcgtgaggagaatatgaagttgtttgttttctttgttgctgcagtagttttggtagcatggccatgccatggcgcaggctaccaaaggttccctctccgaatgaaaactggctatggtgagcgttcttcggaggtaaaatg

SEQ ID NO: 10700 - DNA, 218 bp, Glycine max
  Clone ID: 700967962H1
cacccttaagaagtttagttcactaatcaatcttggtccaatattcacattcacatcatacagagatatgggttttaggtacattgagtacttgtctcttctctagtgcactgtcgccaccaccaccactagaagaagaagccgctcctacaccgcgtggcgctagtggtgattgtgtattgtgattgttatgctcttgtggtaaaaggcgctctctc

SEQ ID NO: 10701 - DNA, 260 bp, Glycine max
  Clone ID: 700967963H1
gttttagatcgtaaaaactaatcactacgaaaacaagagatatcgaagatggctctgcccaaagctaaggagatcgtgtcgtccaattccgtcgtcgttttcagcaaaacctattgccctttctgcgtcgatgtgaagaagctcttcggtgacctcggtgccaattacaaggccatcgaactcgacactgaatccgatggaaaagagctccaagcagcattagttgagtggacggaccagcgaaccgtgcctaatgtgtt

SEQ ID NO: 10702 - DNA, 254 bp, Glycine max
  unsure at all n locations
  Clone ID: 700967964H1
gattgcgacgaagacgaccgtgacatgttcaggcacctcatgaattccaatttcccctcatcttcctccacctccgccaccaccacctcttcttgcaccgtgatttcaccgatgaattctcatttctcggcgctctcctccaccgacatcctccgcctcatcttcgacaaccttccaatcgccgatctcgcacgtgccagctgcgtgtgtcgtctctggaactccgtggcctnccagcgggacatggtaacgag

SEQ ID NO: 10703 - DNA, 253 bp, Glycine max
  Clone ID: 700967965H1
gttttatggcaggatatggcagcccattcggcctgcgattttggtggaggaaaagctgaaaaattggcccttgcaaagtatagacaggttatttggcaagggagggttcttaattcccaattcactgatgaagagttgaggagtcaaggccgttgccctatgacaccggaagaggttggattgttgctagcagctatgggatttgacaatagcactcgtttatatcttgcctctcacaaggtctatggtggag

SEQ ID NO: 10704 - DNA, 246 bp, Glycine max
  Clone ID: 700967967H1
gcggagagtttgctgctacatcgatcatcatcacctcatggacggacacgatccacaagacccaaagcagagccctgctgacatgactgcctttgtgcaaaatcttcttcagcagatgcaaaataggttccagacaatgtccgactccattgttacaaagattgatgatatgggaagtcgcataaatgagttggaacaaagcatcaatgacctgagagcagagatgggagtggagtcctctccatc

SEQ ID NO: 10705 - DNA, 245 bp, Glycine max
  Clone ID: 700967968H1
ctagctccgattcggtgacagaacctccatcatcatcatcaactgaattccacgatctcgttgaaggaaagaaaactctcactttgccaccgaccaaacaatgtccaatggttacgaatttgcgatctttagcccctgaaaccatgtcactgagtatggaagaccaagctctgtcgccagctggcagcgatctgaagtgcgatgggtacggcatcttccttgtcatttcgtcgttttgtttgttt

SEQ ID NO: 10706 - DNA, 72 bp, Glycine max
  Clone ID: 700967969H1
attgccaggagcagcactcaacagattggaagtagggtcacttggaacaggaattatgcggccaaagacatt

SEQ ID NO: 10707 - DNA, 248 bp, Glycine max
  unsure at all n locations
  Clone ID: 700967970H1
gtttgatattttgaagtctttgtgattgagaatgtcgtacactctgtgctttgctcccatttgttccttgaaatccccaaacagacctgggacaattgccggtaattcagttacccaaaaggcttttgggatgaacgaaggtngtcagaattctaaagttccaagctttcagtccttgaaggttaaggctacagaagataaaactacacaaagcaaaacaattaggagcattgtttgttctgattgtg

SEQ ID NO: 10708 - DNA, 255 bp, Glycine max
  Clone ID: 700967972H1
gttacagccgcaccttgattcagagcagagcgaccttgaagagctatggctgtcggaaagaataagaggatttccaagggaaagaagggtggcaagaagaaagccgctgatccctttgccaagaaggactggtacgatatcaaggccccttccgtctttcaggtcaagaatgttggcaaaaccctcgtctctcgtacccagggaaccaagattgcttctgaaggactcaaacatagagtgtttgaggtctcattg

SEQ ID NO: 10709 - DNA, 254 bp, Glycine max
  Clone ID: 700967973H1
gaaaccagcaccagattactttttatgaagtggatttctttgtttttataatctacatgctcaaattgatgtgggagacttgaatcatggagatgatgttgtctgactcgggaggaatcagtgaaggataaatcagttctgcatcccatccgtctacttcacccatctttagtatgaatagcagtattgtgaatttgtatgtggtttgcaatatgttgttattacctttgctcattcaaaagctgggatgaaca

SEQ ID NO: 10710 - DNA, 249 bp, Glycine max
  Clone ID: 700967974H1
ggatcttttgggtaggaccatttattggggcagccattgcagccttctaccatcagttcatcttaagagcaggtgcagctaaggctcttggatcattcaggagtaacccccataattgagttgtctttctcttccttatgatggctctagtggaaagaagataattggagagatggaggttgatatggcaagtttaataataattgggaatgcttttggcttgtgttttgcaacgtttctttgaccctc

SEQ ID NO: 10711 - DNA, 250 bp, Glycine max
  Clone ID: 700967975H1
gagataactagaaacagtgtgatgaaaatgaaggtccttgttttcttcgttgctacaattttggtagcatggcaatgccatgcgtacgatatgttccctctccgaatgaacactggctatggtgcccgtactccggaggtgaaatgcgcaagttggaggcttgctgtggaagcacacaacatctttggctttgagaccattcctgaagagtgcgttgaagcaacaaaggaatacatccatggcgaacaat

SEQ ID NO: 10712 - DNA, 256 bp, Glycine max
  Clone ID: 700967976H1
aagctccaccccaacaccaagaactgatcctaaaagccatttaatcccacgcctctcatttagtgctcgcgtgggtgagttcaaaactgagcagagtccacgatctggtgcaagaggtcccctcagtccaaaggcaggagaagtgagattatcaaatctgggaagaagtccacttaatcagaattcaaaacagcaggaccaaaactaataattaaacgtagaagattgcagtcatatgccttagaaggactttata

SEQ ID NO: 10713 - DNA, 254 bp, Glycine max
  Clone ID: 700967977H1
gtttgtttattctgagaaggaagagagaatagaacgccatggatgagatattgaacaaggtggggtcttactggttctccaagaaggccagcaaggaatttaactctgtcggcgatgatatcaactcactgtcaaccagtattgaagggggaaccaaatggttggtcaacaagttaaaaggaaagatgcaaaaggcattaacagagttgctaaaggagtatgatctacccataggatctttcctcgcgatgcga

SEQ ID NO: 10714 - DNA, 254 bp, Glycine max
  Clone ID: 700967978H1
gcttgatcattatcagatcctgaaataccctctgaccactgaatccgccatgaagaagattgaggacaacaacactttggttttcattgtcgacctgcgtgccgacaagaagaagatcaaggatgccgtgaagaaaatgtatgacatccaggccaagaaagttaacaccttgatcaggcctgatggaaccaagaaggcttatgtccggttgacccctgattacgatgcattggatgtggcaaacaagattggga

SEQ ID NO: 10715 - DNA, 255 bp, Glycine max
  Clone ID: 700967979H1
tgaagttcaacatcgcgaatcccaccactggatgccagaagaagctcgagatcgacgacgatctgaaactgcgagcatttttggacaagaggatctcacaggaggtcatcggagatgcactcggtgaggaatttaagggctatgtcttcaaaattaccggaggttgtgacaaacaaggatttccaatgaagcagggagtgctgactcctggtcgtgttagacttttgcttcacaggggaactcttgcttccgtgg

SEQ ID NO: 10716 - DNA, 245 bp, Glycine max
  Clone ID: 700967981H1
ggaaaattagcctcacaaaagcaaagatcaaacaaaccaaggacgagaacacgatgttgcttgaacttgcacttggtttattggttttggctctgtttctgcacttgcgtcccacacccactgcaaaatcaaaagcacttcgccatctcccaaacccaccaagcccaaagcctcgtcttcccttcataggacaccttcatctcttaaaagacaaacttctccactacgcactcatcgacctctcc

SEQ ID NO: 10717 - DNA, 250 bp, Glycine max
  Clone ID: 700967982H1
gatctgcagctacgatgggtaagggaacggggagtttcggtaagaggaggaacaagacccacaccctctgtgtgaggtgtggccgccgcagcttccacctccagaagagtcgttgctctgcgtgcgcttaccccgctgcgcgcaccaggaaatataactggagcgtgaaggccattaggagaaagaccaccggaactggaaggatgaggtacttgcgtaacgtgcctcgcagattcaagagcggcttcag

SEQ ID NO: 10718 - DNA, 246 bp, Glycine max
  Clone ID: 700967983H1
tgccccctttcttcctgcggcaaaatcaccaacataacttacccatttcgattaaagggccaccctaaaagctgcggcgacaataggtatgagctagcttgtgaaaacaatgttactgtgttacatttgtactctggaaaatatcatgtgcaggcaatcaactacaataatttcactatccgagtggttgatccaggagtcgatcaacaaacaaattgctcctcccttcctcgctatttcttgtct

SEQ ID NO: 10719 - DNA, 238 bp, Glycine max
  Clone ID: 700967985H1
cggctcgagggctgagaagaaggaaatgattccgcaacaatttgacatcgatgccaaatgggacgcctgcattgatctcaccgtccgtcgcttcgtctactccgcaaccgccggtgcatttggcggtctcctatttttcaggagtcctgtgactcgatgggcatctattgcttttggtgctggagttggaattggatctgcatatgcagaatgttctcgtctgttcgatggacctcca

SEQ ID NO: 10720 - DNA, 246 bp, Glycine max
  Clone ID: 700967986H1
cactcactgtgagagcggcgaagacgaagaagaccaataatgcaggacgccggaaagagccacaaggcgaatgccaagctgtcgccggagacgcggaaggatcggaaatcggcgacggggctgagtggatcgccgaagaagggaggccacggcgggaagttcacgtggatcggcaacggctacgagaacgtcgagatggaacacggtgctatggacgccaaggacccgaacttcgaggatccagcg

SEQ ID NO: 10721 - DNA, 239 bp, Glycine max
  Clone ID: 700967987H1
ttacagaggcgaaagcaggacctttaagcttcctaatcccctgtactacattcagtagttccttcacctctcaacaatctagcttgctcctatctatctatatgtaataagatgcgttcaaataggggcactagcttcactttatgttgtttcagctgtgtgtcaacaagtcatgtaagagacttcactatgttgttttctctttcgtggctttaataaattatgcgcccttgttccat

SEQ ID NO: 10722 - DNA, 253 bp, Glycine max
  Clone ID: 700967988H1
cagtttcaaagcaaacatcgacaacaacaaactagaaagaaagaaaggaacacgaaacctcaaaaaagcagaacaccatgaagtttcggtacgcgatggtgtgttcttcgaaccagaaccgaagcatggaggctcatttcctgctcaagaggcagggcttcgacgtgtcctcgtacggcaccggtgcccacgttaagctccctggtccttccctcagagaacccaatgtctacgacttcggaaccccctacaa

SEQ ID NO: 10723 - DNA, 192 bp, Glycine max
  Clone ID: 700967989H1
ctacactgagccaactctagcaggaaatgcaggtttagtggctgcacttgtggcattgtccggtgataaaaccacaggaattgacaaaaacaccctcttctctgctgttcccccaatgtttcccacaccaccaccacctccagcaccatggaaaccatgattttgaagatggaggtagatcgaagaagtcaa

SEQ ID NO: 10724 - DNA, 252 bp, Glycine max
  Clone ID: 700967990H1
ccaagttcaaagatgaagatgatccacgttcttttcctctttgctcttgtctcgttcacttcccatgcttctgtcaatgatttctgtgtagcagacctaaaaggtccagatagcccttcaggctatcagtgcaagccacctaacacagtcacagtggatgactttgtgttctctggctttgtagctggaaacaccacaaacactttcaatgctgcattaacctccgcatttgttactgattttccaggtgtg

SEQ ID NO: 10725 - DNA, 249 bp, Glycine max
  Clone ID: 700967991H1
ctacactatacttgtcaaccctttgagagttagaatggctgctgctattgaaatccccacaatagtgtttccaaactcctctgcccaacagaggatgccagtggttggaatgggatctgcccctgacttcacatgcaagaaagacacaaaggaggctatcattgaggccgtgaaacagggttacagacacttcgacactgctgctgcttatggctctgaacaggctctcggtgaagctctcaaggaagc

SEQ ID NO: 10726 - DNA, 250 bp, Glycine max
  Clone ID: 700967992H1
ctcgagccgcaaaattcttctgccttccccaaccaattgtctttctcactatcgatttggtttggttggcattgtaattgattttgtttgtgaagatctgagtgaggggttaggcaaatgacgagtggttttggtgaatcaacgagagcatctgcaccgagcccatcatgctcggggaacagttcaaacgatgctggcgatttcgaatgcaacatatgcttcgatttggcgcaaatcctgtgatcacact

SEQ ID NO: 10727 - DNA, 247 bp, Glycine max
  Clone ID: 700967993H1
aggaggaagaaaattcctctgacttgtgatttttgataattggtgctgctgcggtttggtttggtattgtctttcttgacaccactgttttggttaatggtgtgattggggaagctaaattgctgctccaataaacacaaccattgttatctttctttatcaataataaataaaccattgcttgtttaaagaaactaaattgctgctcaaataagggcggccattgttatttttctttatcaccggg

SEQ ID NO: 10728 - DNA, 255 bp, Glycine max
  Clone ID: 700967994H1
ctgatgtaggccttggttacattggacaatacagtccaaatgtgagatggatgctgcttggttatgtgggggagtctgatgcagggcttttggagttcgctaaggggtgtcctagtcttcagaaacttgaaatgagagggtgtttatttttcagtgaacgtgcacttgctgtggctgcaacacaattgacttctcttaggtacttgtgggtgcaaggttatggtgtatctccatctggacgtgatcttttggtaa

SEQ ID NO: 10729 - DNA, 257 bp, Glycine max
  Clone ID: 700967996H1
tgggatacagaattgttggaatcattggagaccaatggagcgatctgcttggagaccacagaggcgaaagcaggacctttaagcttcctaatcccatgtactacattgagtagtaccttcacctctctcaacaatctagctagagtttgctcctatctatatgtaataaggtatgctgatatgcactattcaaataggagcattagctatgtttgttaatgtcactttatgttatgtgggtaagcccctaagacact

SEQ ID NO: 10730 - DNA, 170 bp, Glycine max
  Clone ID: 700968001H1
cggctcgagcgcgtgcatagcagagtcagagacagagacgcagccatggggcggagacctgcgaggtgttataggcaaattaagaacaagccataccccaagtcacgtttctgccgtggtgttcctgatcccaagatcaggatttatgatgttggtatgaagaagaaggg

SEQ ID NO: 10731 - DNA, 269 bp, Glycine max
  Clone ID: 700968002H1
cccaagtgctgcagagccgcattttgcttgcaattcagaaactttgtgcgtagaggggacgaaacaatacaatggcttacgctgcaatgaagcctactaaggccggcttggaggagcctcaggagcagatccataagattaggatcaccctttcctctaagaacgtcaagaatctcgagaaagtgtgcgccgaccttgttcgtggtgccaaggacaagcgcctcagggtgaagggacctgttaggatgccaactaaagtacttaacatc

SEQ ID NO: 10732 - DNA, 159 bp, Glycine max
  Clone ID: 700968003H1
gtcaaaattcctgtcactttgatttatgatgacatcaagcaaacatatgctgatattaaacctggaagcatcattccttatagggtgaaggttagtctcatttttgatgttcccatcttgggaaggctaactctacctttggagaaaactggagaaatt

SEQ ID NO: 10733 - DNA, 256 bp, Glycine max
  Clone ID: 700968004H1
tcgtcgaaacaggtcaaattccctacgaggaaattcaagctcgcatgtcgaagaggaaaataagatagcctattgatttgggtccgcaagacatggggaaagtgttgggtgaagttattgattccatggggcttgcacctgttcatttgattcttcacgattcggcattggggttgagtgctgattttgtttctgagagggctgatttggtgagaagcgtgacgcttatcgatacggcgtcgtctactaagggggc

SEQ ID NO: 10734 - DNA, 260 bp, Glycine max
  Clone ID: 700968005H1
atgtgattgttgtgactcgttcttcttcgtcgttatcttcttcttttgttgtttgtgtgtttgttttttctctcacctgaaaatgtcttgctgcggtggtaactgtggttgcggaagcgcctgcaagtgcggcaacggctgcggaggctgcaagatgtacccagacttgagctacaccgagtcactcaccaccgagaccttggtcatgggagtggcaccagttaaggctcaattcgagagtgctgaaatgggtgttcccg

SEQ ID NO: 10735 - DNA, 260 bp, Glycine max
  Clone ID: 700968006H1
gcaacttccaacaccatagtgaaatggcttccaaggctgcacttctcttgtgtttcaatgttctcttcttcaccgtggttagctccacatatgtgccatgcaacccaccccccaaaactccaaaacacccacctgtcccaaagccaccttccccaaagcaagcaagttgccccaaagacactattaagtttggtgtgtgtgctgatgtgttaggtttgatcaacgtgcaacttgggaagccaccaaagaccccatgctgc

SEQ ID NO: 10736 - DNA, 165 bp, Glycine max
  Clone ID: 700968007H1
cggctcgaggagagatggatccagacgcgttggcaaaggcattcgtggagcactactacagcaccttcgacaccaacaggaacggcttagcgaatctctaccaggagggttccatgctcactttcgaagggcagaagatccaaggcgcttccaacatcgttgcca

SEQ ID NO: 10737 - DNA, 258 bp, Glycine max
  Clone ID: 700968008H1
cacactgcataccttaggtcttccgaattcgaagttaatttgcaagatggctaaggaaaaggctcagatcaacattgtggtggttggtcatgtggaccctgaggaggcaaccaccattaacgagctgaagaagcctgttgtggagaaagaagctccagggcatgccatatgagggcatgcacgtacggcctcggaggggaaccagaaaattatgttaacaaaataatctggaaccctaatgtatcagtgtcatcatca

SEQ ID NO: 10738 - DNA, 207 bp, Glycine max
  Clone ID: 700968009H1
gtcgcgttgtgttgcgtcgtgtcgtgcgctgttcctctgtctgtcgtttttgttttcagaccaaaccctagctccgcatcgcaaccatgtcgaccaagcaaggtggaaaagctaagcctttgaagaaacccaagtctgataagaaggattacgacgaggttgacatggctaacattcagaagaaaaaggaagaggagaaggcgctaa

SEQ ID NO: 10739 - DNA, 257 bp, Glycine max
  Clone ID: 700968010H1
gtttcactcccattaacagcaaccatggtgcagaggctcacttatcgcaagcggcatagttatgctaccaaatccaaccagcaccgggttgttaagacccctggagggaagttggtgtaccagaccactaagaagagagcaagtggacctaagtgccctgtcactggcaagaggatccaagggattccacacttgagacctgctgaatacaagaggtctagattgcctcggaaccgcaggaccgtaaaccgagccta

SEQ ID NO: 10740 - DNA, 216 bp, Glycine max
  Clone ID: 700968011H1
aactcttgtctctctctctcctgaaggtaaggcagagaagagaagaagagaaggaaagaggcttgtccctggagaaaagaggaggcaaatacatggagaacgagggtgtaaacacggtggtggtggagcaacaacctgtggcatccacgtccaagtttccgttgagcttttgggaaaccacggtggcttcaacggtggcgctggttttcgcggtgg

SEQ ID NO: 10741 - DNA, 164 bp, Glycine max
  Clone ID: 700968012H1
tctcgagccgaatcggctcgagtctccgaaccctcgatcactctatcgcgctcctatattcgctcctccaccgtcgctctatcgaacaaccacaacaccatcttcatcacatggcaaacgcagcatctggtatggcagtccatgatgactgcaagttgaggttt

SEQ ID NO: 10742 - DNA, 259 bp, Glycine max
  Clone ID: 700968013H1
agtttgttgtgagctataagctagtttatcgtgaggagaatatgaagttgtttgttttctttgttgctgcagtagttttggtagcatggccatgccatggcgcaggctaccaaaggttccctctccgaatgaaaactggctatggtgagcgttcttcggaggtaaaatgcgcaagttttaggcttgctgtggaagcacacaacatccgagcctttaaaaccattcctgaagagtgcgttgaaccaacaaaggactacat

SEQ ID NO: 10743 - DNA, 232 bp, Glycine max
  Clone ID: 700968014H1
gcttcttgttgttggaaagaaaccctagcaagcggaacaatggcagacgttgaggtcgatgtggcggctgcagcagcagcagggcagccgaagaagagaacgttcaagaagttcagtttcaggggcgtggatctcgatgcgcttctggacatgtccaccgatgaactcgtgaagatgttcagtgctcgcgcacgtagaaggttccagagaggcctcaccagaaagcccatgg

SEQ ID NO: 10744 - DNA, 139 bp, Glycine max
  Clone ID: 700968015H1
ccccaaccctagcacccccttccctggcggcgccaccgcagctgcgcccttccctgccggagtgagcctcaaaccccgctgcagcaaagcccttccctaattgtgcggcgcaaattgagaccccctcagttcccgcccc

SEQ ID NO: 10745 - DNA, 157 bp, Glycine max
  Clone ID: 700968016H1
aaagagatcagtggtagtgtggtacattgtgttgatcaaggatggaacaaaagaagtttgtggcactattaatggtggtggtggtgatggcttcttctatgtggaaaggatccaaaggtcttagtctctgtaacatggatgaagatggattggaggc

SEQ ID NO: 10746 - DNA, 209 bp, Glycine max
  Clone ID: 700968017H1
cacagtctcacacatcaagaggagagggaaagaaagaaaaaaaacagaaaaacaaaacagctgaatttggtgtctagtctacattaagattgtcaagagatggattttgattcatctttcttccaataccaaaactttaactcttcctttgtaaattcctctgtttgtgcagaaccattttcttgggagatctttcttttcttcaatga

SEQ ID NO: 10747 - DNA, 226 bp, Glycine max
  Clone ID: 700968018H1
agaagaataatcgagacacagatcatagtgatcattttttaatttctcagatttatccgacgtcgctgcagatccaccaaccgttatggctgccttcagcggtgatgaaacggcaccgtttttcggcttccttggcgccgcagctgccctcgtcttctcctgtatgggagctgcctatggcacagcgaagagtggcgtgggcgtggcttccatgggtgtaatgaga

SEQ ID NO: 10748 - DNA, 266 bp, Glycine max
  Clone ID: 700968019H1
taaaagggttctctttcacacactaatatcgaaattcaattataccctgactctgtgttagtgttgtgtttgttgtgtgttgagaagcagagatgcaaggaagcgcggccgacggagaagccttggatttcgagcctgaggacgatgacttgatggacgaggacggcgcccccgacgccgacgccgacgcttctccacctcaacctaagctcaaatccgccatcacccccgccgccacttcctctctctccgccccgaagaagacc

SEQ ID NO: 10749 - DNA, 219 bp, Glycine max
  Clone ID: 700968020H1
gtttgttgtgagctataagctagtttatcgtgaggagaatatgaagttgtttgttttctttgttgctgcagtagttttggtagcatggccatgccatggcgcaggctaccaaaggttccctctccgaatgaaaactggctatggtgagcgttcttcggaggtaaaatgcgcaagttttaggcttgctgtggaagcacacaacatccgagcctttaaaac

SEQ ID NO: 10750 - DNA, 165 bp, Glycine max
  Clone ID: 700968021H1
caaaaagtgacccatcgtcttccattttcatggaagatgaggaggctgaagtgaatgtgaaaataaaaaaggcttattgcccgcccaagatagtggaaggaaacccatgcttggagtacatcaaatatcttgtcttaccttggttaaatgagttcacagtggagc

SEQ ID NO: 10751 - DNA, 197 bp, Glycine max
  Clone ID: 700968022H1
gtgagtttgttgatcgagataactagaaacagtgtgatgaaaatgaaggtccttgttttcttcgttgctacaattttggtagcatggcaatgccatgcgtacgatatgttccctctccgaatgaacactggctatggtgcccgtactccggaggtgaaatgcgcaagttggaggcttgctgtggaagcccacaacat

SEQ ID NO: 10752 - DNA, 222 bp, Glycine max
  Clone ID: 700968023H1
atttttctcaacatgttcatttgttttagtagatctttacaaaagctatttattttctgcagaggtttggttgtaggactatctcaataggttttcgttctctatttttatttgctcattgctgagcactccgtattcttgtttttctcacaagtttccccattcaattgtgcaatgaggatgtggaaataatttatttgttgttatcaaaaaaataaagaa

SEQ ID NO: 10753 - DNA, 200 bp, Glycine max
  Clone ID: 700968024H1
gaactttttctagcccccttttttattttattttatttttcttttgattccaaaacctggttgtttcttctcctctggagaactgaactgttatgcagtagaaagtccttgtgcactaatttccggtgctgtgtaattatgtattctcttatatgtgaacgaaaatacgataaaaaaaaaaaaaaaaaaagggcggccgc

SEQ ID NO: 10754 - DNA, 259 bp, Glycine max
  Clone ID: 700968025H1
ccactaccttaattgcctctagttctctcactttaactattttcataaaccaaagattaaaagggtcactcctttctttttttacatagttacataacatgtcttcctcagagggtgcctttgaattgggaagtgagttctcagaagccaacaatgttcttctcatgtctctaatggaagaaacacaagaagaagagtactatggcgatgagagacttgtgagcatgattcagtcattggaggcagagatcactgacac

SEQ ID NO: 10755 - DNA, 260 bp, Glycine max
  Clone ID: 700968026H1
ggcgaatctagcacacttctccaagagagccctaagaagcgcacacgcgctcgcaaggcaccacgtgcagccgcagctgctggcagcggaacgcgcttttgcgacggaggcggcgaaatcgatatccccgtcggcggatcgcgtgaagtgggactaccgagggcagaggaagataatcccgttagggcagcggctccccaaagtggccgtggatgcttacgtagcacccaacgtggtcctcgccggccaagtcaccgtct

SEQ ID NO: 10756 - DNA, 252 bp, Glycine max
  Clone ID: 700968027H1
gtgcttggacctacaaagtacaccaaactttcacagccaccctatccctcctcacattcttcattggataccttttgactaggattgccatggcagtgcctcatgcctgtgtgagttgttattatgtatgctatgctgagactccggagaatagattgtttgataaaacaattaaggatcgtcaggccttgttaaaaactggccgtgatgtggttcctacgccaaggggaattaggaggtatacaaggacct

SEQ ID NO: 10757 - DNA, 226 bp, Glycine max
  Clone ID: 700968028H1
tcacaaacacacactgaactaaaaaacatcaaaagagacatggctgagcaaaccttcatcatgatcaagcctgatggcgtccaaagaggccttattggcgagatcattagcagatttgagaagaaaggtttctacttgaaaggtttgaaacttgttactgtggaccgtccttttgctgagaagcactatgctgatttgtctgccaagcctttctttagtggtttgg

SEQ ID NO: 10758 - DNA, 249 bp, Glycine max
  Clone ID: 700968030H1
aatttcccgaaggaggaggaggttctgatcttctttcttttttgtctggttccctttcttccttcaaccaatttcgagatccgaaaccggcatcagatccgatccgaaatgtacggattcgaagctctcaccttcaacatccacggcggcttcctagaggccatcgtccgcggccaccgcgccggcctcctcaccaccgccgattacaacaacctctgccaatgcgaaaccctcgacgacatcaaggtg

SEQ ID NO: 10759 - DNA, 256 bp, Glycine max
  Clone ID: 700968031H1
atcgagataactagaaacagtgtgatgaaaatgaaggtccttgttttcttcgttgctacaattttggtagcatggcaatgccatgcgtacgatatgttccctctccgaatgaacactggctatggtgcccgtactccggaggtgaaatgcgcaagttggaggcttgctgtggaagcacactacatctttggctttgagaccattccagaagagtgcgttgaagcaacataggaatacatccatggcgaacaatata

SEQ ID NO: 10760 - DNA, 159 bp, Glycine max
  Clone ID: 700968032H1
ggcgaagtaatcaatatcctgcagattaccactcatcacctatttgatccagatgatctattgacagtggcatttgataagataggttccatgacaacaaataccatatcaaagcaaaggaagaagcaagagcctgaagtgatgaaggagcttgatcag

SEQ ID NO: 10761 - DNA, 142 bp, Glycine max
  Clone ID: 700968033H1
aataagtccctccttcctctgccttataattcttgtgaccctttttgctggtagcattgaaagtgcaccagcaaacgtgaagccaagccattatgctgcacccttcaataggagtgtttttccttctggttttctatttgga

SEQ ID NO: 10762 - DNA, 244 bp, Glycine max
  Clone ID: 700968034H1
tcgcaacacaacaaaaaaagacaacccagagagcgcgtcttaataaacgctcttctctgaaaacccccatttcttttcttctttcttcttctctttcgcttcttcgatcttcgatcttcgtcgctgaaaatgagagagtgcatttcaatccacatcggccaggccgggattcaggttggaaacgcctgctgggagctttactgcctcgaacacggcattcagcctgatgggcagatgccaagtg

SEQ ID NO: 10763 - DNA, 259 bp, Glycine max
  Clone ID: 700968036H1
ctcaacttctgctcttccaactcctacaacgcttttctctgcactcatgggcaaggtcaagatcggaatcaacggatttggaagaattggccgtttggttgccagagtcgctctgcaaagagacgatgttgaactcgttgccgttaacgaccctttcattaccaccgattacatgacatacatgtttaaatacgacagtgttcacggacactggaagcttcacgatgtcaccgttaaggacgagaagaccttctcttcg

SEQ ID NO: 10764 - DNA, 256 bp, Glycine max
  Clone ID: 700968039H1
ccaccacctagtatctctctaactttgagaaagtgtgtgttgtgtgttctcttctctcactaaaaaaggtttcattaattctatattatggctcagaccacagcgaatcacacagtgaccgtatctgggtgggcagctcatgattcttcgggcaagattaccccctacactttcaaaagaagggagaatggtgtgaacgatgtgacaataaagatactgtattgtgggatctgccacacggacctccactatgcaa

SEQ ID NO: 10765 - DNA, 254 bp, Glycine max
  Clone ID: 700968040H1
ctttcaagttcctttgtcaataagcaagaccaatacactgtggaaggagtgcagaatcttggagacaaagcagtgatgtgtcataggctaaatttcagaactgcagtattttactgccatgaagtccgtgaaacaacagctttcatggttccattggtggctggtgatggaaccaaaactcaggcacttgctatttgccactcaaatacttctggaatgaatcatcaaatgcttcatcaacttatgggagttga

SEQ ID NO: 10766 - DNA, 178 bp, Glycine max
  Clone ID: 700968041H1
cgcgtgcgtggataatatagagaatagtaatgtaatggtagagcaaagtggtgcagagttgattgatcgatgattgatgatggttcgggcgtcggtgaaggtgggttccgccaagttcgtagtgatctgcgtggggcttttaggcttcgctctcgtcgccgactttctatgggcctct

SEQ ID NO: 10767 - DNA, 256 bp, Glycine max
  Clone ID: 700968042H1
gtgagctataagctagtttatcgtgaggagaatatgaagttgtttgttttctttgttgctgcagtagttttggtagcatggccatgccatggcgcaggctaccaaaggttccctctccgaatgaaaactggctatggtgagcgttcttcggaggtaaaatgcgcaagttttaggcttgctgtggaacaacacaacatccgagcctttaaaaccattcctgaagagtgcgttgaaccaacaaaggactacattaatg

SEQ ID NO: 10768 - DNA, 180 bp, Glycine max
  Clone ID: 700968043H1
gtgtctgtgactgtcagaaacaaacattatttggttttctgaattgtttggattgcgagaaaaaaaaagggggggaaatggcaaaggatattcgattcttcgacctcaacacgggcgccaagatcccttcagtcggcttgggaacttggcagtctgatcctggccttgttgctgaagccg

SEQ ID NO: 10769 - DNA, 222 bp, Glycine max
  Clone ID: 700968044H1
tgtcattgaagccattcttgcctcatacttctctttcaacccaagtctcattctccaacatatggcttcctttggagaacaacactctacccaatatccaaccccagagaggcctaaacacaaactttcacaacatgagaaaaaaccactttctgcatacatctgtcatgatccaagaagctatggttcatctaagcacaaggcagagaaaggcacaacaca

SEQ ID NO: 10770 - DNA, 256 bp, Glycine max
  Clone ID: 700968046H1
tgctactgagtttccacactgcataccttacgtctgccgaattcgaagttaatgcgcaagatggctaaggacaaggctcagatcaacattgtggtggttggtcatgtggaccctgaggaggcaagcaccattaacgagctgaagaagcgtgttgtggagacagcagctccagggcatgccatatgagggcatgcacgtacggcctcggaggggcaccagaaaattatgtcaacagaataatctggaaccctaatgt

SEQ ID NO: 10771 - DNA, 110 bp, Glycine max
  Clone ID: 700968047H1
gacggcagcacgcgcaaaaatggtgaagtttctgaaaccaaacaaagccgtcatcgtccttcagggacgctacgccggcaaaaaagccgtgatagtgcgaaccttcgatg

SEQ ID NO: 10772 - DNA, 103 bp, Glycine max
  Clone ID: 700968048H1
gtcttcctttcctctctctcttgtttgcattcatgtgagggtgattttgcagagagttaacagcacaaaccactcactctcttaacttgagattatttttttt

SEQ ID NO: 10773 - DNA, 263 bp, Glycine max
  Clone ID: 700968049H1
tcttcttatagcttcatcccaaaaagctcttttccttctaaatttgattccttagttcagcattctattattatatatggcttcttcaccttcctcagaaaacaaaaacctagagggagtagctggtggtgccggagagaaacccattccacttggtgagaacgttctgcagaagcatgctgcattctttgacttgaataaagatggtgtcatctacccatgggagacttttaaagggttgcgtgaaatcgggactggggttt

SEQ ID NO: 10774 - DNA, 218 bp, Glycine max
  Clone ID: 700968050H1
gctccgtgatgcggtgcatggaatgctctcacagatggatccagcactggttgcatattgcgacaagattgctagccaaggtggcccagttcagttgtctgatgaattaggggattctactttccctgctactcctgttgtgcagctgggtcagagtactagaatgagtgctcgacttcgtcatgtccaaccagaggttaatatggatcagagttatg

SEQ ID NO: 10775 - DNA, 263 bp, Glycine max
  Clone ID: 700968051H1
gaaaaacaagagcaaattgggatcgaagaatttgaagaacaccacaagcaagatgcatgttgttgtggtgctcaacacgcaatcctactgcagaggcctagaacctccttcatcttctccttccgtcgtttccaacaagggaacaaggactttgagtttcaggaggctgctgctgcgtccttctcttgggattcatttatcgcgtactttgctttaaagtgtgttgttactccgaacccagctgtggaattgccattaactgc

SEQ ID NO: 10776 - DNA, 260 bp, Glycine max
  Clone ID: 700968052H1
aaggaactaagaatttcattgaggctagagaaagtggtgatcaatatgtcaaagaatccaaaagttttctttgatattctaattggaaagatgaaagctggacgagtagtgatggagttgtttgccgatgcaaccccaaaaacagctgaaaacttcagggctctctgcactggggaaaaggggattggacgatctgggaaacctttacactacaaaggttctgtatttcatcgtattattccagaatttatgtgtcaggg

SEQ ID NO: 10777 - DNA, 181 bp, Glycine max
  Clone ID: 700968053H1
ctggtgaatgcgtagaaaaggaaaataaagaaattagcgtgaaaaatgttgggtgtgttcagcagctccatagtgtcgccgccggaggagctcgttgccgccggcagccgtacaccgtcgccgaagatgacggcggcggcgctgcggaagtggttcgaggagaagaccccctccgcagtgt

SEQ ID NO: 10778 - DNA, 258 bp, Glycine max
  Clone ID: 700968054H1
gatcgagataactagaaacagtgtgatgaaaatgaaggtccttgttttcttcgttgctacaattttggtagcatggcaatgccatgcgtacgatatgttccctctccgaatgaacactggctatggtgcccgtactccggaggtgaaatgcgcaagttggaggcttgctgtggaagcacacaatatctttggctttgagaccattcctgaagagtgcgttgaagcaacaaaggaatacatccatggcgaacaatatag

SEQ ID NO: 10779 - DNA, 254 bp, Glycine max
  Clone ID: 700968055H1
ggaaggagccgtagcagcagcggaagctctagcttgggcagcgaatcacaatggcgagaggattgaagaagcatttgaagaggcttaatgccccaaagcattggatgcttgacaaactgggtggtgcatttgctcctaagccctcatctggaccacacaaatccagggaatgcctgccactcatactcattttgcgaaaccggctgaagtatgctctgacataccgtgaagtcattgctattctgatgcagcga

SEQ ID NO: 10780 - DNA, 259 bp, Glycine max
  Clone ID: 700968056H1
tggctacctccatggtgaagcttatgcttttctctgctctcatactcttgtccttgcaagcagttgtgtctgtaacaccactgcattttcaacatccactagaccctttaaccaaacaagagataagtcttgtccaaaccatagtccaaaacaagtacccaagctcaagtaacaggttgagcttccactacattggactcgcggaacctgaaaaggatgccatcctcaaatgggaatccatcaaaccaactgttataat

SEQ ID NO: 10781 - DNA, 246 bp, Glycine max
  Clone ID: 700968057H1
ctttcttcttcttcttctcttcttcttcaagattgcgacgacgatccaagtgatagacactcgttgcgatggaacttgtagctgaatccgagcgaactctgtacccatacgtgactggatcctctgtagtcgctatcaaatacaaagatgggattctaatggccgctgacatgggaggttcgtatggatctaccctgcggtataagagtgttgagcgtatcaagcctattggaaagcattctcttc

SEQ ID NO: 10782 - DNA, 217 bp, Glycine max
  Clone ID: 700968058H1
gctataagctagtttatcgtgaggagaatatgaagttgtttgttttctttgttgctgcagtagttttggtagcatggccatgccatggcgcaggctaccaaaggttccctctccgaatgaaaactggctatggtgagcgttcttcggaggtaaaatgcgcaagttttaggcttgctgtggaagcacacaacatccgagcctttaaaaccattcctga

SEQ ID NO: 10783 - DNA, 242 bp, Glycine max
  Clone ID: 700968059H1
ccacttgagagaaaatggcggtgcctctgctctcaaagaagatcgtgaagaagagggtaaagaagttcaagaggcctcagagtgacaggaaaatttccgtcaagactaactggcgcagaccaaagggtatcgattctcgtgttaggagaaagttcaagggatgcactttgatgccaaacattggttatggttcagacaagaagacccgccactatctccctaatggtttcaagaatttgttg

SEQ ID NO: 10784 - DNA, 244 bp, Glycine max
  Clone ID: 700968060H1
ttcatttctacatccctggctctgttccgtcgatgacgatggcgtttagggtgcgaaaccctgacctccgctttctcattcttctctctctcttgtccatcacttccgccaaggtcttcttcgaggagcgtttcgatgacggatggggaaatcgttgggttaaatcagattggaaaaaagatgagaacctggctggggagtggaaccacacctctggccaatggaatggagacgctaacgacaa

SEQ ID NO: 10785 - DNA, 246 bp, Glycine max
  Clone ID: 700968061H1
tgccattgacgagggtcttaccctttcgtcacccaaatggccataatacccttccattttctcttacacgctacccttcttcaccaaacttctccttctcccctctcactctcactctttccatggctgcttcaccccaatcctccgctccaactgtgtcgcctggtgatgttaacatcgacaaagatggtgtatttcaattgattcaagctcatcaggaaaaagctgctagacttccaccagttg

SEQ ID NO: 10786 - DNA, 215 bp, Glycine max
  Clone ID: 700968062H1
attacccatagatagagagcgcggcataacctaaacttacccttcttctctctgtgtgtgtgcgcatcaaacgcaaccagaagcagccatggccactgcaagaactgtgaaggacgtttctcctcatgagttcgtcaaagcttactcttctcacctcaagcgatctggcaagatggagctgccagagtggactgatattgtgacaactgcaattt

SEQ ID NO: 10787 - DNA, 161 bp, Glycine max
  Clone ID: 700968063H1
gtctctgtagcccataaacgcattcccccttgtctgctacctctgtttctcaacctcattctcattttccggtttctctctctctctctctctcatggcgaatctagcacacttctccaagagagccctaagaagcgcacacgcgctcgcaaggcaccacg

SEQ ID NO: 10788 - DNA, 201 bp, Glycine max
  Clone ID: 700968064H1
cccgaaacagtgcactgcatctggactcatcggcgttgctgtgctcccaatcctatttacacagagagagccactgaaacaaaacaacgatctaattcaagtttaaattttcagttctgttctgcttctaatggcgagtttcagaaacgctgcgatcaacgtcttcagagcgatcaatactaacaaagccaccatcgctgc

SEQ ID NO: 10789 - DNA, 194 bp, Glycine max
  Clone ID: 700968065H1
cacatgtggagtatgagaagaagcaaggcgaactttttcaggattatgggagttttgggtggattaattgctgtaggaaaatggtttgaccagatttgcaactggaaaaatccaatcacaacagttctgatccatatcctgttcataatatgggtcatgtaccctgagcttatcttaccaacaatcttccttaa

SEQ ID NO: 10790 - DNA, 206 bp, Glycine max
  Clone ID: 700968066H1
caacttcatgggaggtctggcataatgttttattctaatttacaacatttatgcctctgtttttcatttatttgttatgggcctctattttgtaacaattttgcagtaataagtatgctgttgtcagtgatttatttggcatccttcgcaattattcctccttgtcgaaaatggtgttttgattaaaaattgccttggtttgttta

SEQ ID NO: 10791 - DNA, 272 bp, Glycine max
  Clone ID: 700968067H1
ctttcttggaactttgttactctcacacatgtctcgctccgtgcctttggtttcaaccatttttgtcttgcttctgcttctggtggccactgagatgatggggccaacaatggtggcagaagcaagaacttgtgagtctcagagccaccgtttcaaggggccatgtttgagtgacaccaactgtggctctgtttgccgaaccgaacgtttcactggaggacactgccgtggcttccgtcgcagatgcttctgcaccaaacattgttaatttt

SEQ ID NO: 10792 - DNA, 260 bp, Glycine max
  Clone ID: 700968068H1
cgtcgctccgcaccagtttcaccgcacgaatatcttgttgtttggagcgatccgagaaaaactctgtaaacatgttggtttaccaggacctccttacaggtgatgagcttctctctgactccttccgttacaaggaaattgagaatggaatgctgtgggaagttgaggggaagtgggttgttaaaggagcagttgatgtagacattggtgcaaacccttctgctgagggtggaggagaagatgagggagttgatgatgca

SEQ ID NO: 10793 - DNA, 194 bp, Glycine max
  Clone ID: 700968069H1
gtgcaacagtgagagctttaccttgtgggcattacatgcattcatcttgctttcaggcgtacacttgtagccactacacatgtccaatctgcagcaaatcattgggagatatggcggtttactttggtatgcttgatgctttattggctgctgaggagcttcctgaagagtacagggatcttaatcaggatata

SEQ ID NO: 10794 - DNA, 218 bp, Glycine max
  Clone ID: 700968070H1
gtcgtttgtaacgcctttgtttgcgttttttgcacagaagaattaacacgtatatagcaagcatggcagtcacactctacgaccttagctctgcctctgggttgaagaagcttgatgagtaccttctcccacgcagctacatcaccgggtaccaagctacaaaggatgatcttactgtttatgcagctttgccaactgctccatcagatgattatggg

SEQ ID NO: 10795 - DNA, 182 bp, Glycine max
  Clone ID: 700968071H1
caacaagcagatcaatctctctctctctctcaaccataatagtcatgggtttgaaggaggattttgagcagtatgctgagaaagcaaagactttgccaccgactcaatcaaacgaagacttgcttatcctttatggattgtacaaacaggccaccgttggacctgtcaacaccagccgtcct

SEQ ID NO: 10796 - DNA, 256 bp, Glycine max
  Clone ID: 700968072H1
ctaacgcgtgcatagcagagtcagagacagagacgcagccatggggcggagacctgcgaggtgttataggcaaattaagaacaagccataccccaagtcacgtttctgccgtggtgttcctgatcccaagatcaggatttatgatgttggtatgaagaagaagggtgttgatgagtttcctttctgtgtccatctggttagttgggagaaggaaaatgtttcaagtgaggccctggaagctgctcgcattgcttgc

SEQ ID NO: 10797 - DNA, 241 bp, Glycine max
  Clone ID: 700968073H1
cacggatccacctgaaatttgagattccttcgaattgttaactctctcaatttcaagttggaaactttttcgattttcgctttctggaggtgtgaattgttatttgaaagtcacaagcaatggtgaaggacactgcatattatgacatattaggtgtcaattttgatgcatctgctgcagagatcaagaaggcttattatgtcaaggctagaattgttcaccccgataaaaatcctgggga

SEQ ID NO: 10798 - DNA, 252 bp, Glycine max
  Clone ID: 700968075H1
ctcctggcacccgtaccgcacttgagattcaaacgctgtgttcttgaagtggttaagggcagggcactctctgcatcttcctgtactgtatcaagacgcaatcaacgcaatggattgggcttttgtgcataaaacctgggataagtgggcttctacgaacattggttattctggtcatccgttaaaagctgctttgcttattaattatgacccgactggaccatctcgattattatctaccattgctgagca

SEQ ID NO: 10799 - DNA, 187 bp, Glycine max
  Clone ID: 700968076H1
gagagagagagagaaagatttcagctccaacttccaacgagactgcgtgtggtatccttatagattggctgcaatattaccctttttcatttttgaagtatcgtttgaaattgaagtacaatggcactttccttcagggaagaaagagatacctttggagccattcaagttccctccgagaaattat

SEQ ID NO: 10800 - DNA, 255 bp, Glycine max
  Clone ID: 700968077H1
ctcagaattctctaaaagagatctttttctgctctttgaagaaagaagggtctttgcttgattttggagatgtctctgctctcagatctcatcaaccttaacctctccgataccaccgagaaggtgatcgcagagtacatatggatcggtggatcaggaatggacctgaggagcaaagcaaggactctcccaggaccagttagcgacccttcagagcttcccaagtggaactatgatggttccagcacaggtcaa

SEQ ID NO: 10801 - DNA, 139 bp, Glycine max
  Clone ID: 700968078H1
cttgcttacaggccatcatgcattgctgctgcagccatactcactgcagctaatgaaattcctaattggtctgtggttaagcccgagcaagctgagtcctggtgtcagggaataagaaaagtaagcatatatagtttat

SEQ ID NO: 10802 - DNA, 191 bp, Glycine max
  Clone ID: 700968079H1
gataaatctcccattattataaataatattaaagagcctgcattatttcttgagactatgtttggatatctactgttgattggagaggaatggggtggaacaaaatttagtggatggataaaaaagattgattttatcccataatcccaacttgaagggggagaaaagagggattggatggaatggaatat

SEQ ID NO: 10803 - DNA, 262 bp, Glycine max
  Clone ID: 700968081H1
gtaatggcgaacatagacatcgaagggatcttgaagcagcagcagccttatgatgggcgcgttccgaagacgaagatagtgtgtactttgggccctgcttctcgatccgtagaaatgaccgagaagcttctgagggcagggatgaacgttgctcgtttcaatttctctcatggcacccacgactatcaccaggaaaccctcaacaatctcaagactgccatgcacaacactggcatactctgtgccgtcatgcttgacacta

SEQ ID NO: 10804 - DNA, 202 bp, Glycine max
  Clone ID: 700968082H1
aaaaggaccagcatatgaccgaattgtcttgaatgccggagttgtggatcacttgcttggagttggtggtgcagaagatatatctgcagccctggatagagccagagaggccattgacagtggtaatgctctgaaacgactcctaaactacattaaggtctcccacaaaataggttgaattatttgagcattgcaaatacct

SEQ ID NO: 10805 - DNA, 259 bp, Glycine max
  Clone ID: 700968083H1
aaattttcagactcaacaagcttcgaaccaaatcttattgagaaaatgtctggtcgtggaaagggtggaaagggtttgggaaagggaggtgccaagaggcacaggaaggttcttcgtgacaacatccagggcatcacgaaacctgcgattcgtaggttagcgagaagaggtggcgtgaagaggatcagtggtttgatctacgaggaaaccagaggagttctgaagatattcttggagaacgtgattcgcgatgctgtga

SEQ ID NO: 10806 - DNA, 255 bp, Glycine max
  Clone ID: 700968084H1
ctcgtcgttctttttatttgcggtttcttcttcttctcacgttctacctaacattttctaaaacatgtctggggaagaggaagaaaacgccgcagagctcaaaattggagacgagtttttgaaggcaaagtgcttaatgaactgtgaagtttcattgattcttgagcacaagtatgagcagcttcaacagacatccgatgatcccatgaatcaagtttctcaggtatttgaaaagtcactgcagtatgtgaagcg

SEQ ID NO: 10807 - DNA, 256 bp, Glycine max
  Clone ID: 700968086H1
gaacagatgaaagttccattgaggatgagaaagaagagttgcctgagccagtaccagaaccaccaaaattggttcgtatggcaaatttgtgtgttgtgggtggtcatgcagtgaatggggttgcagagatacatagtgaaattgtaaaagatgatgttttcaatgcattttataagttgtggcccgagaagttccaaaacaaaacaaatggtgtgacaccaaggagatggatcaggttctgcaatccagatctgag

SEQ ID NO: 10808 - DNA, 202 bp, Glycine max
  Clone ID: 700968087H1
attaagcatcatatcccaaaccctaatcgttgtgatattcctagttgtgtgaaatggcttccaagggcacagttgcatccacttatgttgctctattcctatgtctcaacatgctttcctacactatggtgagctccacctacaatatccctgtaatccctgatccatcagtgccttatcaaaagggtacctgtcctataga

SEQ ID NO: 10809 - DNA, 236 bp, Glycine max
  Clone ID: 700968088H1
agtgagcggaattccgaccacctatgtcagaagtggttcaagcgctggttcgattagtgcagacttactaacatgagcaagaggacgtttggaactgatcaaggaggatccaacagagggggtgatgataatcaagatacacaagacatgtaaatgggaacaaaagcttgtgttgatacaatggcagaaaaggaaaatattatccttcaaattttaaccattcctttttaaccccc

SEQ ID NO: 10810 - DNA, 241 bp, Glycine max
  Clone ID: 700968089H1
tttccattgatttcttgcttctatatattacttgcttcttttcttgatcatgtcccttgctggtaaaatcagctctgaaattggtgttcaggcaaccgctgcaaagtggttcaacctcttcacaacacaacttcatcacgttcaaaatcttactgatagaattcatggaaccgagctgcatcattgtgaagactggcatcacaatgagtcggtcaagcactggacttataccatagatggc

SEQ ID NO: 10811 - DNA, 253 bp, Glycine max
  Clone ID: 700968090H1
gcataatcaaatcaaccatggctaccctcattgctcccatcaccttttcgcctggtttagatgcagaagctcttagaaaagctttccaaggatgggggactgatgagaagaccgttatagcaatattgggtcacagaaatgttcatcagaggcaacaaatcagaaagatttatgaggaaatttaccaagaggacctcatcaaacgcctagagtctgagctttctggtgactttaagagagctgtgttaccgtt

SEQ ID NO: 10812 - DNA, 254 bp, Glycine max
  Clone ID: 700968091H1
gatggcgtcgagcggaggggtgccgttttggagggcagcggggatgacatacatcacatactcaaacatatgcgcgaatctggtcaggaattgcctcaaggaaccctacaaggctgaagccatctctcgtgagaaggtccattttgctctctccaaatgggtcgacgccaagcctgaaaaacctactattcgttcagacaccccagagcagtgatccggaatagttggaagctataaatgcataaatctttgag

SEQ ID NO: 10813 - DNA, 200 bp, Glycine max
  Clone ID: 700968092H1
ctctctcaccaaattcttattagaacgaaaaaagaaaagaaaagaaaaaagagcgatttttccctcaccaaagaagaaccaaaacaatggcggatcaactcaccgatgaacagatctccgagttcaaggaagccttcagcttgttcgataaggacggcgatggttgcatcacaaccaaggagcttggaactgttatgcgt

SEQ ID NO: 10814 - DNA, 236 bp, Glycine max
  Clone ID: 700968093H1
ccaaaactggaaagcacggtcacgctaagtgtcactttgttggaattgatattttcactgccaagaaacttgaggatattgtgccctcttctcacaactgtgatgttcctcatgtgaatcgtactgattaccagctcattgatattgctgaggatggatttttgagtctgcttactgaaaatggtaacactaaggatgacctcaagcttcccactgatgagagtctgctcactcag

SEQ ID NO: 10815 - DNA, 253 bp, Glycine max
  Clone ID: 700968094H1
gaagaagatggctttaggtgttcctgctcttccgttgacatacgtggctcacgttctggcagttgttgccagcgtcttggtcgtggtctgggtcgtcaatttcaggggtggcttggcttgggattctgataacaagtccctcatcttcaacattcatccagttcttattgttattggctacaaattccatgggggtgaagctattataagttacaaagcttttcccctaaagaaggaagtgaagaaattgata

SEQ ID NO: 10816 - DNA, 126 bp, Glycine max
  Clone ID: 700968095H1
gcgaaacaaaccagagaccaagaaagagtgcttacctgaaattgaattcaatggcgacgagaaatcgaacaatagaatttagaaaacacagagacgccgtgaagagcgtgcgcgctcctctatcct

SEQ ID NO: 10817 - DNA, 125 bp, Glycine max
  Clone ID: 700968096H1
cttttatttctcttgctctaatctcacaagtcacttgcaaatgctcccaatttcctcttcaatttagggtttcatctttcgcttcgagtttgcgcatccatggattccatctacgcgagctcgac

SEQ ID NO: 10818 - DNA, 284 bp, Glycine max
  Clone ID: 701063701H1
cggagtcctcatttttcttcatctgtatctgaaccctaatcccttcggaattggaaagaataagaatcatcaatggagggagtgctgtccgcgaatgagcaacagagcatggtctcttctttcctggaggtcgctcagggccagaccgccgagactgcgcgccagttcctccaggccacaagttggaagcttgaggaggctcttcagctgtttctgatagggagtgaaggtggggccgtgccgttgccggtgccgccgcctccgttgttgcacactccgccttt

SEQ ID NO: 10819 - DNA, 283 bp, Glycine max
  Clone ID: 701063702H1
ctcacctcaacacagcagaagcagcaatgaagaagaagatgatggcaagcacggccatctccctcgtcttcgccgcgctcttcctcttctcctccgtccactctttctacctccctggtgtcgctcctcgcgatttccaaattggtgaccccctctttgtcaaagtgaacaagttatcatctaccaagactcaacttccatatgactactacttcttgaagtattgcaaacccaaaacgatattgaacaatgcagaaaatttgggagaggttcttagaggtga

SEQ ID NO: 10820 - DNA, 282 bp, Glycine max
  Clone ID: 701063703H1
gtctctctgagattgtggtgagtagcataatggaggcaccgaagctgaaggtagtgacactgaaagccatcgaagcaactccgtcaaccttcaaagagttcggtcaggtcgtggaggcttcgcgagacggccaggaattcggtccccacgatgctcaactcgacctttcccaaggaactccaaggttctacattatcaagcttgaaaaatgcccgcttaagttttctagtattacacatcatgcaatcgtgactcagtgcctcgggtctatcggtggtcatg

SEQ ID NO: 10821 - DNA, 281 bp, Glycine max
  Clone ID: 701063704H1
ctaacgcactctcaactcttcacttgttaatgcttcctcctgacagttctaaactcaacgcaatggagcttagcaaagtcacgttagagatcttttcaaaattggagcagcaatggctctcgcactacgaagcatcaaccaaaacgcgcatctcagcattgacggcggaggaaccaccgccattgtcgccggcgcctccctcgtccacctcgaagaccagatccgcgcccaaacctccgatcctcacacgcaaatcgccgattacttcgacattatcgccg

SEQ ID NO: 10822 - DNA, 279 bp, Glycine max
  Clone ID: 701063705H1
gggagtgtcaagagataccaatgcccatcacaatgctcgaggagatgtagccagacccaataccacaagccctgcatgtttttctgtcagaagtgctgcaggaaatgcctgtgtgtgcccccggggtattatggtaataaagctgtgtgccttgctacaacaactggaagaccaaggaaggaggacccaagtgcccttgaacttcaacttcatcaaattgttgcttttcactatatttttatcatctcccttgggccaatttaatgcactagcttactt

SEQ ID NO: 10823 - DNA, 281 bp, Glycine max
  Clone ID: 701063706H1
cagaagagaagatgggatctgtgtgtatctgagactgtgcatcatccctgttcctaacgattcttgtggacagacagcgcactggtattttaaacaggcctgatgggttctagattcccatctcatcagctcagcaatggcctgtatgtatcaggtcgccctgaacagcccaaagaaagaactccaacaatgacctcagttgccatgccttacactggtggagacatcaagaaatcaggagaattagggaaaatgtttgatatccccatggatgcttctaa

SEQ ID NO: 10824 - DNA, 275 bp, Glycine max
  Clone ID: 701063707H1
gtgaagacactacagaacacaacacaaacacagagaaagagagtgaataaatccagcattgttctgttctctgcaacattctccactctcaaccatggcttcaaagcttttactcatcactgtcttcgtttttgatttgattgcttttggacttgccgtggctgctgagcagagaagaagcaccgctagtgttgtgacggacaatgaaaagaattataattactgtgtctataactctgatatagcaactggctatggtgttggagcatttttgt

SEQ ID NO: 10825 - DNA, 123 bp, Glycine max
  Clone ID: 701063708H1
gcattagctatgtttgttaatgtcactttatgttatgtgggtaagtcacctaagacactccacgtacctacttgttgtctcttacgcggctttaataaatcttctgcccttgttccatattta

SEQ ID NO: 10826 - DNA, 197 bp, Glycine max
  Clone ID: 701063709H1
ctataagctagtttatcgtgaggagaatatgaagttgtttgctctctttgttgctgcagtagttctcgtagcatggccatgccatggcgcaggctaccaaaggttccctctccgaatgacaactggctatggtgagcgttcttcggaggtaaaatgcgcaagttctaggcttgctgtggaagcacacaacatccgag

SEQ ID NO: 10827 - DNA, 259 bp, Glycine max
  Clone ID: 701063710H1
cgtttttgttttcagaccaaaccctagctccgcatcgcaaccatgtcgaccaagcaaggtggaaaagctaagcctttgaagaaacccaagtctgataagaaggattacgacgaggttgacatggctaacattcagaagaaaaaggaagaggagaaggcgctaaaggagttgaaagccaaggcgcaacagaagggaagctttggaggttctgggctcaagaaaagtggaaagaaataagggctctttatcatgattgtat

SEQ ID NO: 10828 - DNA, 117 bp, Glycine max
  Clone ID: 701063711H1
cccatctatgatgttttctcctaaagtagtagaccattttatgttgctggaatggtttctttccctgttcctgtattatgtgtccatgatctaatatatatatatataaaggcttag

SEQ ID NO: 10829 - DNA, 278 bp, Glycine max
  Clone ID: 701063712H1
cacacacgtaacttcatctgggtttcaggaaaaaagaaaaaggaaaacaatgggttccgataatcaccagaacttggagttcttgaaggagatcggtttgggctcttccaacattggctcttacattaatggccagtggaaagccactggttcttctgtcacttctgttaatccttctaacaatcagagtatagctcaagtgaccgaagcaactttgcaagattttgaggaggggttgcgagcttgcagtgaagcagctaagacatggatgactatac

SEQ ID NO: 10830 - DNA, 278 bp, Glycine max
  Clone ID: 701063713H1
tgcacactctctgctcctagggtttctccttcgagtgagggaaatggctcccaaaccgcctagtacgggtctgtttgttggactgaacaagggtcacgtcgtcaccaagaaggaattgcccccacgcccctcagatcgtaaggggaaaacagcaagacggtgcactttgtgaggaacctcataagagaggttgctggttttgcaccctatgaaaagcgtataactgagttgctgaaggttgggaaggataagagggcactgaaggttgcaaagagaaa

SEQ ID NO: 10831 - DNA, 280 bp, Glycine max
  Clone ID: 701063714H1
catttccataaccttagtcatcttcttctttcatctttctccctaacggtatcgagggaaaaatatggcggaagaacacagatgccaggcaccgcgcttctgcgccaacaattgcggtttctttggcagccctgccacgcagaatatgtgtccaagtgctaccgcgatttccagctcaaggagcagcaatcttccaacgccaagatggttctcaatcagtcgctggttccttcaccgccaccggcggtgatttctcagccgtcgtcttcttcttcggccg

SEQ ID NO: 10832 - DNA, 284 bp, Glycine max
  Clone ID: 701063715H1
cgaataaagaagtacccaagcaaggtcatcaagaaggactccgcgaagaagaccgcgaagaaatctagggttaaggccttcgtgaagctcgtgaactaccagcacctcatgcccacgcgctacacgctcgacgtggatctaaaggacgctgttacccccgatgttctagccaccaaggacaagaaggttaccgctctcaaggagaccaagaagcgcctcgaggagaggttcaagaccggcaagaataggtggttcttcaccaaactcagattctgatttcgaaa

SEQ ID NO: 10833 - DNA, 282 bp, Glycine max
  Clone ID: 701063716H1
ccaagttccaagatgaagatgattcactttcttttcctctttgctcttgtctcgttcacttcccatgcttctgtcaatgatttctgtgtagcagacctaaaaggtccagatagcccttcaggctatcagtgcaagccacctaacacagtcaagtggatgactttgtgttctctggctttgtagctggaaacaccacaaacactttcaatgctgcattaacctccgcatttgttactgattttccaggtgtgaatggtcttggtgtatctgcggcacggttag

SEQ ID NO: 10834 - DNA, 279 bp, Glycine max
  Clone ID: 701063717H1
gaagaacaagattggcgttatgggtctcttcctttctaggaatttggcttgcaaattcatatacccttttcttttctccaagaaggtttccaaggatttgtttcccaagcagttggagaacatgatgtctctgatctctcctcgtactggcaggcatttgcagcgctatgacaatggctgtcgccaagttgtgggatgcattccttatagatacaagaacaatggtacacaggataaggaattggaggttcttgtgattagtgctcagaagggtcatgg

SEQ ID NO: 10835 - DNA, 278 bp, Glycine max
  Clone ID: 701063718H1
cgctgatccagattgtatttccaacagaactagactacctccaccggcatggccaggccgcttccgccgaggccgtcaaccaactttgtgtcgtctttgtccgttacaaacttgttggaggcggcctcaaccatcttcttgcaaacaaggcaccaccgcagcctttgatgaggttgaggttggggtcgacctcgtcggcgtcgtcgatggtgagaccgaggacgaagagggggatgccgaggaagaggactttatcctctgtgcgcttggaggtaggg

SEQ ID NO: 10836 - DNA, 273 bp, Glycine max
  Clone ID: 701063719H1
tgcaagatgggaaatcttcggatcattctgatgcgattaaggatctggtgggagggtactatgatgcaggggatgctatcaagtttaactttcctgcttcgttttccattactatgttgagtcggagtgtgattgagtacagtgcaaatatgaggctgctggggagcttgatcatgtgaaggagattatcaagtggggtactgattatcttctcaagagttttaatagcactgctgataccatcaccacccttgctgctcaggttgggcttgg

SEQ ID NO: 10837 - DNA, 279 bp, Glycine max
  Clone ID: 701063720H1
catcgaatattctggtcagagagaagccactgatgatgcattgtataataaggagccaactgaagtaattagagtgactcaatctgatcctagttgtgaggaagtaaaagccgaggaggctggcaagtccacagaaaccagctcaagctatgatccagatgaaactgagaagttgaacaaaactcaggtagctgatacaactattgaaaatgaggaaactctgaacgtaaatccagaggttcattcatgtgatgtgcaggatgatacaatggtagcgag

SEQ ID NO: 10838 - DNA, 280 bp, Glycine max
  Clone ID: 701063721H1
ctcagattcagcaattttctattttcttctctcatggcttcagcttccaaaaaggatttccctgctgatgacaaagctggaacagcagagaataaagcatccaaagatgaaacgtcatctaaagattctccagcagcacaaagagccatacagctacttctggacctgcaactggttttccaggcaacccttttgatcttcactgcaatgtctggcctgctcaatgatccaagtatcaaggaattggctgaacagatagcaaaagatccatcattcaacc

SEQ ID NO: 10839 - DNA, 214 bp, Glycine max
  Clone ID: 701063724H1
gaatctggctcgagccatatcccctgcttctagtgctcttccttgtcagccaccttggtgtggtgtatgcacttcatcatcatcatctaagatggtgagaaaactcatgaggctgctactgctgctgatgttctttctggtttctcatatgttctctctgtctctgctattcctgcaacaagaacccaaaatttgaaaggcgcagaagaagaat

SEQ ID NO: 10840 - DNA, 273 bp, Glycine max
  unsure at all n locations
  Clone ID: 701063725H1
ataaatttgagagacaactctgcaaacatgttggtttatcaggacctccttacaggtgatgagcttctctcggactccttccgttacaatgaaattgagaatggaatgctgtgggaagttgaggggaagtgggttgttaagggagcgttgatgttgacattggtgcaaacccttctgctgagggtggagaagatgagggagtcgatgacgcagctgttaaggttgttgacatcngtgatacattccgacttcagagcaaccgcttttgataag

SEQ ID NO: 10841 - DNA, 268 bp, Glycine max
  unsure at all n locations
  Clone ID: 701063726H1
cttgaggctagggttaccggattcttgcgttttaatatctgccattcagaagcatggggcactccaatgtgtggaattctcacnctaagaactacggacctggttctcgcacttgccgtgtgtgtgggaatcctcatggattgatcggaaatatgggcttatgtgttgcaggcagtgcttccgaagcaatgccaaggaaattggcttcatcaagtatcggtgaaagattagttttccacctgctccacccggtttggattcttgcatc

SEQ ID NO: 10842 - DNA, 276 bp, Glycine max
  Clone ID: 701063728H1
cggctcgaggtttagaagaacaaagcttcccacctagctaggcctttctattgtagcactcaagtttctttcttcgtggaacttaagaaaatgaaggaaaaaatcagttggacagttgcagacgccgtggactataaaggcttccctgcagacaggtccaaaacaggtggttgggtacccgcagctcttattttagggattgaaatcgtggagaggctctccaccatggggattgcagtgaacctggtaacatacatgatctcaatcatgcatctg

SEQ ID NO: 10843 - DNA, 278 bp, Glycine max
  Clone ID: 701063729H1
tcaaaactcaagcattgcatccctcttgatttgtagtttgttttgtgctttagataaaagttctgccaaatcaagaggggttttaagatcatagtgtgtgttttgcaacaatggctaagttctttgctgctatgatcttggcactctttgccatttccatacttcaaacagtggtaatggctgctaatgaacaaggaggccacttgtatgacaacaagagcaaatatggaagtggaagtgtcaagagttaccaatgcccatcacaatgctcgaggaga

SEQ ID NO: 10844 - DNA, 279 bp, Glycine max
  Clone ID: 701063730H1
caaaactcaagcattgcatccctcttgatttgttgtttgttttgtgctttagataaaagttctgccaaatcaagaggggttttaagttcatagtgtgtgttttgcaacaatggctaagttctttgctgctatgatcttggcactctttgccatttccatacttcaaacagtggtaatggctgctaatgaacaaggaggccacttgtatgacaacaagagcaaatatggaagtggaagtgtcaagagttaccaatgcccatcacaatgctcgaggagatg

SEQ ID NO: 10845 - DNA, 285 bp, Glycine max
  Clone ID: 701063731H1
cggtcgacttctctgggaaggactaccaggaacctccaccagcaccactcattgatgctgaggagctcacaaagtggtccttttacagggctcttattgctgagttcattgccactttgctcttcctctacattactgtgctcacagttatagggtcaagcaccagacggatcatgctgatgcgtgtggtggggttggcattcttggcattgcatgggcctttggtggcatgatcttcatccttgtctactgcactgctgggatttcaggaggtcacattaaccc

SEQ ID NO: 10846 - DNA, 284 bp, Glycine max
  Clone ID: 701063732H1
tgttttcttggactcaataagttatttaaatgaagttagttttagcatttattttttattcatttcgtttggggatgagagcaagtggctactctttcagtttctttatgtgttcagattaatttcacattaagttgtcaaagagcatttggtccccatattgcgggattatgacatgaggcagcagaggtggaatataggagtttagctactactatggcagaaatgatctgggctcaatatcttcttacggaactttacatcataattcctactcctattgt

SEQ ID NO: 10847 - DNA, 277 bp, Glycine max
  Clone ID: 701063733H1
gagaagaccatcttccaccttaacccttctggccgttttgtcattggtggccctcatggtgatgctggtctcactggaagaaagatcatcattgatacctatggtgggtggggtgctcatggtggaggtgccttttcagggaaggacctaccaaggttgacagaagtggtgcctatatcgtgaggcaggctgcaaagagtgttgtggcaaatggccttgccagaaggtgcattgtccaagtttcctatgccattggtgtccctgagcccttgtcagt

SEQ ID NO: 10848 - DNA, 274 bp, Glycine max
  Clone ID: 701063734H1
actcgagccgaatcggctcgagcgaacatttcatactctattatcggccttcgtttcgttacttagtttctcagtcgttacgtttgagatcaaccttgcatcagggttagggaatggctgctatcttagctcggaaatcactccttgctcttcgtgcgcgccaattggctgtaagcggtcaagggctgcacagctcccaaaactatggccttcgattaagtgcacactcctactctaccaaaagagaggatgaagaaagggagcaactcgcaaa

SEQ ID NO: 10849 - DNA, 275 bp, Glycine max
  Clone ID: 701063735H1
cgcaaagattgcccccacatggatgaatatttctttgaagatgaaagaggacccagagactgataaagcttttggatgggtgctagaaatgtatgcttatgctgttgcatctgctgtgcatggtgtgaggcacattctgcggaaaacttcatgttacagcccccatgggatcttgaaactaacaagaagtacattctccattacacttatggatgtgactacaatatgaagggtgaattgacttatggcaaaattggtgagtggagatttgataa

SEQ ID NO: 10850 - DNA, 276 bp, Glycine max
  Clone ID: 701063736H1
attctctttgcgcagttccctacctctcctttcaagatgcagatcttcgtcaagaccctcaccggaaagaccatcacccttgaggtggaaagctctgacaccatcgacaacgtcaaggccaagatccaggacaaggcaggaattccccggatcagcaacgtctcatcttcgccggaaagcagctcgaggacggccgtaccctcgccgactacaacatccagaaggagtcaacccttcaccttgtccttcgtctccgtggtggcatgcagatcttcg

SEQ ID NO: 10851 - DNA, 278 bp, Glycine max
  Clone ID: 701063737H1
actgctctctctctcaatttcccttcactctcacgcgccgccgtggtttccgccggcggccactccctatacgccgcgcatccatcccgcttccctctcctcgcttttctctaaaaaaaattaaaaatttctctgaagaccgtgttatcatcatcgttccctgagttaggttttctgttcttcctagggtgtttttattgtgtccaataacaagaggagggggaagagaaacaagcaataagaagaaaaaaaacaaggaaaaattagggatttttttt

SEQ ID NO: 10852 - DNA, 274 bp, Glycine max
  Clone ID: 701063739H1
cattccattctctctgtgtatttccctacctctcccttcaagatgcagatcttcgtcaagaccctcaccggcaagaccatcacccttgaggtggaaagctctgacaccatcgacaacgtcaaggccaagatccaggacaaggaaggcatccccccggaccagcaacgtctcattttcgccggaaagcaacttgaggacggccgtacccttgctgactacaacattcagaaggagagtactcttcacctcgtcctccgtctccgtggtggcatgc

SEQ ID NO: 10853 - DNA, 274 bp, Glycine max
  Clone ID: 701063740H1
cttaagcttgctactgagtttccacactgcataccttaggtctcccgaattcgaagttaatttgcaagatggctaaggaaaaggctcagatcaacattgtggtggttggtcatgtggaccctgaggaggcaaccaccattaacgagctgaagaagcctgttgtggagaaagaagctccagggcatgccatatgagggcatgcacgtacggcctcggaggggaaccagaaaattatgttaacaaaataatctggaaccctaatgtatcagtgtca

SEQ ID NO: 10854 - DNA, 275 bp, Glycine max
  Clone ID: 701063742H1
cttggaatcactgttggtgttgctctcagtgttgtcttcccttcactggcttatcactgttctcatcatcattctcttcatagggacttcttcaaggtcattctttaaaggaattgagatgtggagggaagagactattttcaagagagaaaagaccaagcaacgggcgacgttggttgattctcatggtgaagataagacagttagaatcgacacaaaatatgaaccgctgattcctaaagaagagaagtcaactatacaaattttatgtctca

SEQ ID NO: 10855 - DNA, 273 bp, Glycine max
  Clone ID: 701063743H1
cagaagccagattgcaatatgtagactttactgtgccatatgcagaatcaggattgtcaatgatagttacagaaaagtccaacgaatccacatggatgtttatgaagcccttcacctggcaaatgtgggtggcaactggggccgtttgacttacacaatggtagttgtgtggtacctggagcgggaaccaaatcctgagtttcaaggcaattggaaaagccaagtcagcactgctcttatgtttaccttctcctctctattctttgctcaaag

SEQ ID NO: 10856 - DNA, 272 bp, Glycine max
  Clone ID: 701063744H1
caagtgagtcatcggtggttgagaatggtggagaaggcgaagggtaggaaggaggaggtggttaccagagagtacaccattaacctccacaagcgcctccatggctgcacatttaagaagaaagctcctaaagctattaaggagtaaggaaatttgcccaaaaggccatggggaccaatgatgtgagggtggatgtgaagttgaacaagtttgtctggagccagggaatcaggagtgttccaaggaggattagggtaagactcgctcgcaag

SEQ ID NO: 10857 - DNA, 277 bp, Glycine max
  Clone ID: 701063745H1
gcacaaccaaagcaacaccccaaatggcttcagcttctgttcccatggcgttgtcactgagctctgttaccaacaacaacaagccttcatccgaagccttcttcaggccactacccctacgccaaccaaagaggaccctcttcaccacgaaggcagtgtcaaactccaagcctcaaatcaatgcatctttgaaggagaaggcagttgccggactcacagcagcttctgtgacagcatctatggtggttccggaggtggctcatgctgctggatatga

SEQ ID NO: 10858 - DNA, 275 bp, Glycine max
  Clone ID: 701063746H1
agttaatgagagatttggcaaatgcttgcttgagttaagtggtaacaatgcaataattgtcatggatgatgcagacatcaaattggctgtacgctctattttgtttgctgctgtgggtactactggtcagcggtgtacaacttgtcgtagactgtttctgcatgacagtatttatacagacgtactagaccaacttgttgaagtctacaaacaagtcaaaattgggaaccccttggagaaggggactctagttgggcccttgcatactcgtactt

SEQ ID NO: 10859 - DNA, 279 bp, Glycine max
  Clone ID: 701063747H1
gcgcaagacaacaaaatccccaaaatatctctcgctctgaaaccgccatggatttgcagcagagcgagttcgatcgcctcctgttcttcgagcacgctcgtaaggccgcagaagccgaatacgagaagaaccctctcgacgctgataacttaacaagatggggtggagctttattagagttgtctcagtttcagagttttcctgaatcgaagaaaatgacccaagaggctgtttcaaagctagaggaggcgcttgcggtgaatcccaagaagcatgaca

SEQ ID NO: 10860 - DNA, 280 bp, Glycine max
  Clone ID: 701063748H1
cattaacatgactctttatttataatgcaggagctattatagatgcacgagtcagaagtgcggtgtaaagaaaagggtggagaggtcattccaggacccaacaattgtgatcacaacatacgaagggcaacacaaccatcactgtccagcaactctgaggggcagtgctgcaagcatgttgtcatcaccttccttttttggttcctcttatatggcgtcaagcttaccccaagattttcttgctcagttggttccaagttatagccaaattaatgatcac

SEQ ID NO: 10861 - DNA, 275 bp, Glycine max
  Clone ID: 701063749H1
gctggaattgcattgaataagaactttgtgaagcttgtttcttggtacgacaacgagtggggatacagctcacgtgtcattgatcttcttgtattcgttgccaagaagtctctttaaggtgttacttcaaagtagcttgtcttacattattaccgtatgtttatgtttagctgcgatttagtgtcttgctcgagcaaaaaatgagaggtcctgaataaatcggtttctgaaaccagtggtgttacttgttggaggagcattagctcttttttgga

SEQ ID NO: 10862 - DNA, 272 bp, Glycine max
  Clone ID: 701063750H1
tgatttgcagggttggattataaacttcaagtagggattggacacttttatcatatattctacgagggatgtttagcaaattttgaaattggagaggaaggagaagaagcatccaagctttaccctgaagtgaattacacacgatggacgagtacctaaaaatttatgtgtaaaaggaactcattcagtaggagttcagtgattcaaacaggaacacggtttttagctacaataaccttaatttaaggagatgattttgtgcttataattcg

SEQ ID NO: 10863 - DNA, 270 bp, Glycine max
  Clone ID: 701063752H1
cgactcttagccgccgatctctcagggcttgcatcttctcaggtaagctgtgaagatgtacacatcaaggaagaaaatccacaaggataaggatgctgaaccaactgaatttgaagagtcagttggacaggcattgtttgatctacgaaaataccaatcaggagcttaaaagtgatctgaaggatttatacataaactcagccgtgcaagttgatgtttctggaaaccgcaaggctgttgttattcatgtcccttacagattaaggaaag

SEQ ID NO: 10864 - DNA, 273 bp, Glycine max
  Clone ID: 701063753H1
tgggttaacaagggcgacgcaccggcattgccagagactcttaaaaattacaacaagctgttgtctcttggcttcaagattgtattcttgtcaggaagatatcttgacaaaatggccgtaacagaagcaaacctaaagaaggctgcttccacacatgggagcagttacattctcaaggatccacatcttatcactccaaatgcactttcatacaaatcagcaatgagagagaatctgttgaggcaggcctacagaattgttggaatcattgga

SEQ ID NO: 10865 - DNA, 235 bp, Glycine max
  Clone ID: 701063755H1
ctttgtttctattctcccatctctgtacgttctctcccgtcaacgttggctttctctctctcctcggattttgaaatagaaaagatgacgccggagaatgggaaagagaagaaggattttgatgcagaagcagcagggatgaaagatacaggaatggtgaaatctgggagtttgaggatgacatgggtgtctcagatggtgatggtactggtgtcttgttgggcttggatggtgg

SEQ ID NO: 10866 - DNA, 266 bp, Glycine max
  Clone ID: 701063756H1
cttccctttctttctttctttaaaggtcttgtgagtgaaggagcctagtgttgttgagaaattaaacgtctgcggaaagcaacaatgtcaggacctgagtgttgctcaaacccaccagttctgaaccccaatgcaggagctggccatgttgaaaaactcgctggtctcaattcctatctctccggttcccctaattccattgccattcttctcatctcggacatttatggctatgaagcacaaatttgaggaatattgcagacaag

SEQ ID NO: 10867 - DNA, 269 bp, Glycine max
  unsure at all n locations
  Clone ID: 701063757H1
gtgatttcagtgagtgatcggtgttcacttgatctcatcataatcgtcagcgtcaattgaagaagatgccgatcagaaacatcgccgtcggaaggcctgaagaggcgactcaccccgacacgttgaaggcggctttggctgattcatctcaaccttcatcttcgtgttcgccggctcaggctccggcatcgcctacaacaagctcaccgacaacggcgctgncacccctgccggcctcatctccgcctccatcgcccatgcattcgccc

SEQ ID NO: 10868 - DNA, 270 bp, Glycine max
  Clone ID: 701063758H1
ggtgctccaagaaggaggagagtgcacttagcaacaacaagagcagagaccatgactactgtcatagaaaaactgggcattaagattgagaggaaccctcctgagtccaagctcactcaactgggtgttaggcaatggcccaatggggttgccctccaagtaagttcccatggacatatgaagccaaagagacttgctatcttctggaaggaaaagtgaaggtctttcctagtgggtcgaatgagtcagttgaaattgctgctggtgact

SEQ ID NO: 10869 - DNA, 271 bp, Glycine max
  Clone ID: 701063761H1
cgagaccatgcatttattgttgctgcactgaaggagtcttcactgcttgttgttagtggtgatgggagaagggtcaagcggctcaatccacttcgtttcaatgaatctagagatcataagttatatactgttttggtagagaattgccagaggatcattcaaagaagaacattcaacaaatattccatgaagctggaaatataaagaggataaccattcatgacccacattctacttcagagtctgcaaaacaacataacaagcaagacat

SEQ ID NO: 10870 - DNA, 273 bp, Glycine max
  Clone ID: 701063762H1
aacgtgtttgaaactatttggtctttctgagcatgtgctgcttgcttcctctccaacggttagatgcatgtggcaagtgcggtgattcaatttaatcctattttttgtattcttttgtcactctggtgttttagttgttacttccatataatttagcaagagtgattttggtttcttctttttttcccttttgtgaaaaggaaatttataggtgtgatgctactgcatttcttttgtcaaagttcagaaaaattgttgtgcatgtataacttg

SEQ ID NO: 10871 - DNA, 271 bp, Glycine max
  Clone ID: 701063764H1
caaggacttgtgcgcaggatgaagttttgaggatctctgtgcctccacagactggtgatgttcctttgcagaccctttatagcctcaatggtgacgttattgcttgggggtttaaggccacttctagtgttgtcaaagtgactttccaaaccctggagttcaagaagatccatcttgtggccctcttttggatgccattgctatcagagagttctacccgccaatgcctacaagagttaacttggtaaaacatcctggctttgaggagggt

SEQ ID NO: 10872 - DNA, 273 bp, Glycine max
  Clone ID: 701063765H1
gcgcaatcgtcttctgcttcaaggaaggagagcttgttattctctatcaacaaggaaaatgtcaggtgaagaggttgttgttgcagctgagccagctgctgccatcccaggcgagcctatggatatcatgactgccttgcaattgtgctcagaaaatctctggcttatggtggtcttgcacgaggccttcacgaaggggcaaaagtgattgagaagcatgctgcacaactccgtgttctagcagaagactgtgaccagcctgactatgttaaa

SEQ ID NO: 10873 - DNA, 269 bp, Glycine max
  Clone ID: 701063766H1
gttttgttctcattctgtgactctgtgcttagttaacgttaacagtgacttaagatggaggattctgcagatgtcacccacgatgttgtgtccctcctctcttctcctcaaagggactttcttcttcgaaacaacggcgacacgttaaaattgacagcttgaagggtaagaaacttggtttgtatttttcggcatcctggtgtggtccatgtcaaacatttacgccaactttggtggatgtgtacaatgaggttgcaaaaaaaggtgac

SEQ ID NO: 10874 - DNA, 272 bp, Glycine max
  Clone ID: 701063768H1
caagcttttgaatttagtgcctctcctctctgtttacccttccagatattgcagatacagcaagatcatgagtgggacttcggaaaagaaacttgtaagactcgatgttagttctgatactgtatgcccatggtgctttgttggcaaaaaaaatctagacaaggccatagctgcctccaaggataaatacaactttgagataatatggcatccctttcaacttagccctgatgcccctaaagaaggcattgacaagagggagtattacagaa

SEQ ID NO: 10875 - DNA, 266 bp, Glycine max
  Clone ID: 701063770H1
gcttctattctctgagaaagttcttcctgaatcttgaaggttcttcaacacccttcttaaggaattgaagagcatggacagtgaccagaaagtccaaatagcttcttggagtgaggtcatgtcaggtgctggggtggagttcatcaaggggctcctaatttgggacaaggtggtggtggtggccttcagagacaacctagtatgaccaagaacaattgtctttgttctccaaccacacattctggttcgtttcgttgccggcttca

SEQ ID NO: 10876 - DNA, 264 bp, Glycine max
  Clone ID: 701063771H1
caaacctaacgcagcatcgctattctcttcattccatggctttgcccaaccagcaaaccgtggattaccctagtttcaaactcgttatcgtcggcgatggtggcacaggaaagacaacctttgtgaaaaggcatctcaccggagaattcgagacgaaatatgagccaaccatcggtgtggaggttcacccattggattttttcacaaactgtggaaagattcgattttactgctgggatactgctggacaggagaaatttggtg

SEQ ID NO: 10877 - DNA, 263 bp, Glycine max
  Clone ID: 701063772H1
tgacaacccgatttaagaagaaccgcaagacgcgcggccacgtcagcgccggccacggccgtattggaaagcaccgcaagccccccggcggccggggaaatgccggcggcatgcaccaccacaggatcctcttcgacaagtaccacccggggttcttcgggaaggtagggatgaggtactttcataagctccgcaacaaattctactcccccatcgtcaacatcggaaagctatggtctctgataccccagacgcgaaggaca

SEQ ID NO: 10878 - DNA, 268 bp, Glycine max
  Clone ID: 701063773H1
cgacgccttcagcaaccatgtcgaggagaaaggttagggagccaaaggaggaaaatgtcactcttggtccagccgttagagacggtgaacatgttttcggcgtggctcgcatctttgcctccttcaacgacaccttcatcatgtcactgatttgtctgggagggaaacccttgttcgcatcactggtgggatgaaagttaaagctgacagagatgaatcatctccatatgctgctatgcttgcagcacaggatgttgctgccagatgt

SEQ ID NO: 10879 - DNA, 268 bp, Glycine max
  Clone ID: 701063774H1
ccaagaaggagaccctcattgaccttacagttatagaagactattactggcaagacggagaccctcattgaccttacagttatagaaatcttgtcaaggcacgcatctgatgagttctaccttgggcagagagatggtggtgactactggacttctgatgccggtccattagaggcatttaagaggtttggcaagaagcttgaagagattgacaagaagcttatagagaagaacaaagatgagacattgagaaaccgctatgggccag

SEQ ID NO: 10880 - DNA, 195 bp, Glycine max
  Clone ID: 701063775H1
cagaaacagaagcacagcaccacgaaccaatcccagcctttcggttcccccacaaataaaatagttaccacaacccatttgttgcttgctgcgagcgaatccctctctctctttctctttctctctcatccagatcttgcaaaaaaaaaaacacaatggcagcgagcgctcccattccacgcgaagagttcgtgt

SEQ ID NO: 10881 - DNA, 270 bp, Glycine max
  Clone ID: 701063776H1
atttggtagcctttaaaaagttatttagtatttcacttgaccaactcaaccactgtagatatcactcacgagtcacaaagtggggatatcataagacagcaagaaagaaaatgggagtggagaagcagttgttgaggcctggcaccggtcccaagccaattcccggtcagaacgtcaccgttcactgcactggtttcgggaagaccggtgacctttctcagaaattctggagcaccaaggatcctggccaggaccctttcactttcaaaa

SEQ ID NO: 10882 - DNA, 273 bp, Glycine max
  Clone ID: 701063777H1
ctccttctgcgaaatcacttcctcttccaaggaagaagctcttacctttttggagagccacaatttcgacctagacgctgccgtttcgactttcctcgacaacgccaacaaccccctcatccctctcaacgacgacctcgccattcccaaccccaacgccgtttcccctccctcagattctcactctccggacttcaacccttctcgctcgccgtctccgtctccttcgcccacccgcaccccctacgagctccgatcccgtaggtctctcgg

SEQ ID NO: 10883 - DNA, 272 bp, Glycine max
  Clone ID: 701063778H1
ccaaaatctcaatcttgttcagatccctcataccccttttttcattcaaactaagggggtgacaagatgagtgaggtcttcgaagggtacgagcgccagtactgtgagctctctgctaatctctctcgcaaatgcagttctgcctctcttgtttctggccaggaacagcagcagcagaagttgtctgagattaaagcgggactagatgatgctgatgttctgattcggaaaatggaccttgaggcgagaagtttgcagccaagtgtaaaagc

SEQ ID NO: 10884 - DNA, 273 bp, Glycine max
  Clone ID: 701063779H1
gagaaggaggaggagggtggttttacgcgacttgcctcattcgtctgcgattgcgagcctttgacggaggatgatctggaagccatcgaagcctctctttccaataacaaaaaacgtccattcaacgatcacactcacactctcgtcgtcgcttgcccaaatcgcttatcgctcttcaacacccaaacgcttcttctttctcgccccatccccgtccatgcgattcaagaatgacattgcctgtaatgaagtttagtggtcaaatttcttata

SEQ ID NO: 10885 - DNA, 271 bp, Glycine max
  Clone ID: 701063780H1
gaaaggctgaagaacacatagagagagagagagaagtgcagaaaaaatgagactgttcgatccatggcctgttttcttcaagagagaatggaagcggaattggcccttcttggttggattcgccatcaccggaactctcatcacaaactttcccttggtctctctgaggaggaagccaaaaagtcgaaattcgtccaggcacacaagaggtgactttagaatggaagatttgcagtggctttgcacattgtattagatgtgtgaagagagc

SEQ ID NO: 10886 - DNA, 269 bp, Glycine max
  Clone ID: 701063781H1
caaaataagtagaacctaacatcggttgcatattgagagtagaattactggctagaagatacaaagtatatgtattcactcttgcattttaatccttttaacctatgttgtgaatctcaaatcagggaggcaatggggaaattcttgctcgtgggcacagccgagttcccgtctattctggaaatccaaaaaacattattgggcttctactggtggggtttaaatcctcctcattttgactttaatttagtctatcccttttaattact

SEQ ID NO: 10887 - DNA, 271 bp, Glycine max
  Clone ID: 701063782H1
gtttgtccatttagccatgaagaagttgtctttctccatccccagcgcaaaaccccaatcggtggacacttccaccacccgaaaggacgacgacagcgacggaaccaaacagtacatcaccgaattcgacccttccaaaccgcaaaccccaaaatcacaatccccccaatccaaaaccagtggaacccccaacaagacaacgaacacagcaccacgcggtggcgccgcactccggaggagaccgagctgctgcgtaagctgaaactggagg

SEQ ID NO: 10888 - DNA, 270 bp, Glycine max
  Clone ID: 701063783H1
tcaatttctaattagggtttcgcttagagtaaccaataaccatgggagtcttcacctttgtcgtccgcaaatccggcagcgaatggagcgccaagcaacattccggcgacatcgaggcctccgccgattccaccttcgatctccaacggaagctcgtgcaagccgctctcgccgttgattcctccggtggagttcagtcctctttctctcccgtgtctcctacctccgctgtgttccaggtgatagtgggtggtgcagtattcgttggag

SEQ ID NO: 10889 - DNA, 78 bp, Glycine max
  Clone ID: 701063785H1
ctacctccctttccccccccctcttcgcgtcttttcgcaaccgaatgcatcttggatactggaatagtgtgccaatat

SEQ ID NO: 10890 - DNA, 265 bp, Glycine max
  Clone ID: 701063786H1
tcgagctcttctgcggcgtagacctgggacactccaacgtttggaattctcacccaaaaaactacggtcctggttctcgcacttgccgagtgtgtgggaatccacatggattgatcaggaagtatggccttatgtgccgcaggcagtgcttccgtagcaatgccaaggaaattggcttcatcaagtatcgctaaaagagctgttgtcacctacggaccaatattatgttctggcactaggatgttttgaagatgttatgtttgaa

SEQ ID NO: 10891 - DNA, 178 bp, Glycine max
  Clone ID: 701063787H1
cgaaatgtcgggatcggaggacgagggaggagaagagtacctcttcaagatcgtcataatcggagactctgcggtgggcaaatccaaccttctctcccgctacgcccggaacgagttcaacatgcactccaaggccacataggtgtcgagttccagactcagtgcttggaaatcgact

SEQ ID NO: 10892 - DNA, 257 bp, Glycine max
  Clone ID: 701063788H1
ggagaagacggagaaggtgaagtctgaggcagttcagataattgaagcgtttgaggttctgccaaagctcgtggttttcgatctcgattacactctctggcctttctactgtgagtgtcgatcgaagcgcgagattcctctctgtatccccacgccaaaggcatattgttagctctcaaagagaaaggcatcgacattgccatcgcttctcgctcgccaacggcagacatcgcaaccgctttcctcaacaaattgaa

SEQ ID NO: 10893 - DNA, 266 bp, Glycine max
  Clone ID: 701063789H1
ctcattgactctctctttctctctctctctgcacagtgccaatggcggatccaatcgcgaaggctctgatcgcgtttgcgctcttagcttcccttttgctgtgcttgcaagcttcctccgatgtccccttcatcgtcgtcacaaaaaggcctccctcaacagactcaagtccggcgccgaaagactctccgtcaccatcgacatctacaaccaaggaacctcgacggcctatgatgtaagcttatcagacgatagctggccaagtg

SEQ ID NO: 10894 - DNA, 269 bp, Glycine max
  Clone ID: 701063790H1
gaaaaacccttagccgccagcattcgttgaactcattcttcttcaactcaacagagcaagcgttcgcactcgcagattcttgagcaagaataatggggaagaaaagaaaacacagtgagactactcaagctgtagcacaacccaaaaaggaagaggctgctccagagagaccggctaggacccttttggggtggaaggataagaatcaagttgaggatgattcaccaatatttaggaacaaagagaagctattggtcacttgctctagg

SEQ ID NO: 10895 - DNA, 268 bp, Glycine max
  Clone ID: 701063791H1
cttccctcaccatggccgagtcctgcctcctctcttctccctcctcactcttccacaccaaaaccaaaccatctctctttacaaccccctccaaacccctcacactccaattttcatgcctcaactcctccgtctctctctccctcgccgcaccaactcaccgttctccccttgtaactttcgtggcccaaacttccgattgggctcaacaagaagaagaacagagcctcgctgaaaccgaagcgggcctggaaagttgggagcccaa

SEQ ID NO: 10896 - DNA, 266 bp, Glycine max
  Clone ID: 701063792H1
ccggagggaatttataagctcatgacatacataagggacaactacaataatccaccagtgtacattaccgaaaatggcgttgcggaatcaaagaacgactcacttgcaatcaatgaagcccgaaaggatggtattcgattagataccatgatggccatctcaaatccctgcttcatgcgatcaaagatagagttaatgtgaagggctactatatatggtcattttcagatagctttgaatgggatgctggttacacagctcgattt

SEQ ID NO: 10897 - DNA, 269 bp, Glycine max
  Clone ID: 701063793H1
ctccatttcaatattacccttgcacagcccccattctctggccagcttttctgatcgagaaaaacaatgaagatcttcaattgggttcacaagaggtttcatcatcacaacactctgaaagatgggtttgctacaaacatgaaaaagactgaacctacaattaacaacacggatagtcaagctttgctgaaacaagttgccctcactgaatcacttggtggatgggaagatggcattctaaccattggcactctcggctatgatccctt

SEQ ID NO: 10898 - DNA, 269 bp, Glycine max
  Clone ID: 701063794H1
ctgccgttcaaagttgatatgtaagctgactggagacaatgtcactaagtcagaggaacatatctggaagcatatgagtgggaaaaggtttctcaataaattagagcaagaggaagaagaaaagttgttgtgtcatggatggaaggtggagagagcttacatgagtcaaaaagtgcagatggtggaaaaaaggatagaatgaagaagaagaaaaagaataaaaagaataaggtcaaggaaattgatgaggagaaattgcaggtgtcaaa

SEQ ID NO: 10899 - DNA, 270 bp, Glycine max
  Clone ID: 701063795H1
ttcctttcttccttcgtcccattctcgaattcgcgtgtgcctcttgcaatcccccaaaggttttttgaagcagaagaatggacttctttactagagacataaatgaggattctatgcttagatgcccattcttgaggaacatcaatgagcctactaacttctcattctcttcacctttggctttaccaatgcctgttcgtggagctaaaggtccaatttttgaagatggtcccaattttgatttggcatttaggcttttccacgggagtg

SEQ ID NO: 10900 - DNA, 278 bp, Glycine max
  Clone ID: 701063796H1
ctcaaattgaagtgattagattctctaccaagtcaattgagagggagataaactcagtcaatgacaaccctttgattgatgtctcaaggaacaaggcccttcatggtggtaacttccaaggaacacctattggagtgtccatggataacacccgtttggctcttgcatcaattggcaagctcatgtttgctcaattctctgagcttgtcaatgactattacaacaatgggttgccctcaaatctcactgccagcagaaaccccagcttggattatgga

SEQ ID NO: 10901 - DNA, 123 bp, Glycine max
  Clone ID: 701063801H1
ccgaaacgtaacaatgccaacactctcatccaaaccccctttaccaattacccggtcggcgccgccgcggccaccacccttctcttccttttcttcgccgtcggaatttccacagaacatacg

SEQ ID NO: 10902 - DNA, 292 bp, Glycine max
  Clone ID: 701063802H1
tgtgataggagaattgaagaagggtttgaatccaccatcactgacaaatctggtatttgtgacgccttacatgaccacagctgtcaaaacaggcattgtcgttggcattatatcgcttgcggaaggaatagcagtgggaagaagctttgcaatgtatacaaattacaacattgatggcaacaaagagatgatagctattgggaccatgaacgtagttggttctttcacctcttgctacctcacaactggaccattttcgcgttcagctgtgaactataacgctgatgcaaga

SEQ ID NO: 10903 - DNA, 290 bp, Glycine max
  Clone ID: 701063803H1
catttttggacaaggcgtttatcaatgctgcaatgagtattgaccctgagtggaagatgataaaaagagatgaaggacgaattgagaagtggattctgaggagagcctttgatgatgaagagcatccttatctgccaaagcacattttatacaggcagaaagaacaattcagtgatggagttggctatagttggattgatggccttaaggcccatgctgcaaaacatgtgactgaaaaaatgatgcttaatgctggtaacatttacccccacaacaccccaaaaccaagg

SEQ ID NO: 10904 - DNA, 289 bp, Glycine max
  Clone ID: 701063804H1
caagaatggcacttcgttgcttggtgatgtccctttctgttctcttcactcttggtcttgcgagagaaagccatgccagagacgaagatttttggcatgctgtttggccaaacactcccattccaagttcattgcgagatcttctaaagcctggccctgcaagtgttgaaatcgatgatcaccctatgcaaattgaagaaacacagtacccgaaaaccttcttctataaagaagaccttcatccaggcaaaacaatgaaagtacaattcagcaagcctcccttcaacaa

SEQ ID NO: 10905 - DNA, 283 bp, Glycine max
  Clone ID: 701063805H1
ggaaaattctcagtcgacgtagcgaaaatggcggttccctagcgacgaggctcgtgcggcggcgatcgccaccgcttctctggcggcgcacttttctatgtcggcagtcgacgccgaaaaggaagtcgtggtcgtgccggagcttccaccgttcgattactccccgccgccatatgcgggccccaccgctgaggagattctggcgaacgcagggagtatcttagtccttccatcttgcattcatacaagaaccccgtgaacatagtggagggtaagaacagta

SEQ ID NO: 10906 - DNA, 287 bp, Glycine max
  Clone ID: 701063807H1
tgagaaattgggtgctatgttagacgaagacccagccttatggataggagaaatcaaatagctaaaaggcttgaattatacaagcaagctagggatgatattgactccgtggcttggaaataatgaaatcccagagtttgcaacagatgtttcgaggaagatttgttatagatttgatcattcttactatttttttttaatcaaacacgaacagaaaaatctacggttatggcaagaagttgaattcgcacttgcgaatgattcttttggtccacagacacagtgta

SEQ ID NO: 10907 - DNA, 283 bp, Glycine max
  Clone ID: 701063808H1
ctgaaaaccccttacggcttacgctgctttctttgttcttcatttgcggttttgatttggatttggatttggatttggactttggtcgtcaacacagcttttggtccttcgcttcgtttacgaatcctcttcttgttgttcctgcaacgcactgcattcgatcaatccatccatcttcacttgcttggtttcgatcggagggaaatggccgatcagttatccaaaggagaggaattcgagaagaaagctgagaagaagctcagcggttggggcttgttggctc

SEQ ID NO: 10908 - DNA, 284 bp, Glycine max
  Clone ID: 701063809H1
gagataactagaaacagtgtgatgaaaatgaaggccttgttttcttcgttgctacaattttggtagcatggcaatgccatgcgtacgatatgttccctctccgaatgaacactggctatggtgcccgtactccggaggtgaaatgcgcaagttggaggcttgctgtggaagcacacaacatctttggctttgagaccattcctgaagagtgcgttgaagcaacaaaggaatacatccatggcgaacaatatagatcagactccaaaacagttaaccacaagctt

SEQ ID NO: 10909 - DNA, 276 bp, Glycine max
  Clone ID: 701063810H1
tctccatttccattttctctctcacttttcaagatcgtaagctatgggaaagtcttacccaactgtgagtgctgattaccagaaggccgttgagaaggcgaagaagaagctcagaggcttcatcgctgagaagagatgcgctcctctaatgctccgtttggcatggcactctgctggaacctttgacaagggcacgaagaccggtggacccttcggaaccatcaagcaccctgccgaactggctcacagcgctaacaacggtcttgacatcgctgt

SEQ ID NO: 10910 - DNA, 283 bp, Glycine max
  Clone ID: 701063811H1
tatcaagctggacccttcttatgtcagagcctaaatcgtttggccacaatatatgtcaggttgggagaagcagaaaaagcactagattgcaatcagtcaatcccatatgttgattcaatacttgctttccaagctcaggctcttcaaaatcaccttaacaaatgcatagaagcacggaaagtcaatgcgtggagtgatatactaaaggaaacacagtttgcactatccttaggtgctgattcagctccacaggtctatgctttacaaactgaagcttgctgaa

SEQ ID NO: 10911 - DNA, 284 bp, Glycine max
  Clone ID: 701063812H1
tgcaatcagaggaagagaagagacactgaggtcgttggcgagaatgggaagaaagaaggggtatgttgagttcgaggagtcgccgccggacgattttgatccggcgaatccgtacaaggacccggtggcgatgctggagatgagggagcacatcgtgagagagaagtggatccaaatcgagaaggccaagatcattagggagaagctccgctggtgctaccgcatcgaaggcgtcaaccacttccagaagtgccgccacctcgtcaaccagtatctcgatccac

SEQ ID NO: 10912 - DNA, 227 bp, Glycine max
  Clone ID: 701063813H1
ttgaaacattccccggttcaagcacgttgaagactacaacaggtattccattctcttcacaatatgccagcgccatcatgtccatggaggtgacgcccctagaaacaacttccctaaaggaaatgtgatcgagtgttatattatcattacggggatggcagtcaaagacgccattcacattagtacctttcagaaccgcatcagcattaagctcagctagatcgcga

SEQ ID NO: 10913 - DNA, 289 bp, Glycine max
  Clone ID: 701063814H1
caacacccctttttatgtgtaccgtactattttctagttctttttcttgtacaacgaaatttagatgcagtttcttagatgttggtgttgttttttaatcaaaattagagttttatcttgatagtaccggattatcaaggtaaaactctgattcttatcagaaaatggcaccaaaaatactttaagaactgtatgcaagttttttgttgtttttttttggtaattcttgtttgtgatgtgatgatttcaactgcaaactatgcctatcagtatggttaccaagactata

SEQ ID NO: 10914 - DNA, 292 bp, Glycine max
  Clone ID: 701063815H1
attcgtgagagcttattcaatcaaaatgtctcccaaatacaagctagtgctgttgatagcattggttttggttgcaacctcccttgctggtcgcacaaaggaacatcctaagcatcctccatcccttcaagaacaacaacacaccccacaccttgatagctacccgccaaagcatagaccgaaaccacctcatcctgtacatggtgccggggaggaaccaacctccattcctcgaaagaagggaccaagaaggcctccgaactgatgagtgagtcaaaggtttcagttgcct

SEQ ID NO: 10915 - DNA, 291 bp, Glycine max
  Clone ID: 701063816H1
acttttccaaatatttcccctttcgattttctcccctttccgggattgcgaaaaacgacgctaattcgtgtagctgcatttagaatcgccaactcagaagcagtcctaattcctcaatggagagttctgaagaggaaactgatggagtctctggtaatcatgctcctaaggaactgattcgtttggcatcacatggtgcaaaatttatagatgaagtaatcaatggtcaaaatgaatgctgtctggataattttcgcatggataaacatgtattctataagttgtgtgaat

SEQ ID NO: 10916 - DNA, 287 bp, Glycine max
  Clone ID: 701063818H1
tcggctgtatattatggagtccacaagctctgggaggctaataatgttgggaaacgatatgaagacattcctgtgctagggcaaaggcagtcagaatagtgaccagcttgttagccattttgaagttttattattttcatgaaaatttgaagtgattaagagctggaagcagtttccatttctacaataaataccatatgcttgtctctttcaggcttaactcttatgcgtggtttcatttactggccattggaaatattaaatattgaaccattgcagaatctgta

SEQ ID NO: 10917 - DNA, 286 bp, Glycine max
  Clone ID: 701063819H1
gagagagagagagagagagaagaagaagaaggagcagaggaagaagaaggaggagatcttgagagatcaggtcgcaactgatcatggggagagaagttacaggaatgcaagttgtggacaagaagccaaatggcgtaataccagcttcaaatggtagttctaatgataaagtgtgcatttctcctaaaaggacagcagctaaggttcaggcgaaggatcacgaggtaaatgaatgtaccaaagctaactcttttgttgaaaaaagccaagagaagatgatggtttg

SEQ ID NO: 10918 - DNA, 179 bp, Glycine max
  Clone ID: 701063820H1
gtgcagaagccaaaggccagtgttatctacgtgagacttgtagtccaaagcttggccacaattgaagcacgagagcattatccctttggattaatatagccatctcaaatctcaatttcgataatccgttagcactttttttcagtggctctggtgctgccattacgttccacaaaacg

SEQ ID NO: 10919 - DNA, 274 bp, Glycine max
  Clone ID: 701063821H1
agcaagaacactgttccaatacggaatctaagccaaagcaaaccaaacatcttgaatcatgggttcaacaggtgagactcagattacccccacccacgtatctgatgaagaagcaaaccttttcgccatgcaactagccagtccttctgtccttccaatgatcctcaaatcagcacttgagcttgatctgttggaaatcatagccaaggctggccctggtgttcatctttcccccactgacatttctcctcagctcccaacacagaaccctgat

SEQ ID NO: 10920 - DNA, 222 bp, Glycine max
  Clone ID: 701063822H1
ccgtgttttcagctccggtaacctctccttctccgccgccgttgctatctccgccgtgaccttccatccctcaacgccccacagatcttcaatttgattgcttgggtcaacaatttctgtcattctcaatcatggcaactagacttcagtttgaaaataattgtgaagttggagtcttctctaaactcaccaatgcttactgtttggttgcgattggaggtt

SEQ ID NO: 10921 - DNA, 279 bp, Glycine max
  Clone ID: 701063823H1
gatctggcatctttgaaggggcttatggtcagtcaagctgcatcaaattgtgttcccctttaaactattctacacattttatcttaagggcatcaaggacttgcctcaggagcttctttcccagcctgttgagcccagcccagctattgagcccagcccatctgccaaggcctgtgaaccacatgctgttattgctggctttactgactgaggaacaatgaggatcgacatttttcttttgtttcttttttaaggacgaaactcggatacagttcttag

SEQ ID NO: 10922 - DNA, 285 bp, Glycine max
  Clone ID: 701063824H1
ctagaaacagtgtgatgaaaatgaaggtccttgttttcttcgttgctacaattttcgtagcatggcaatgccatgcgtacgatatgttccctctccgaatgaacactggctatggtgcccgtactccggaggtgaaatgcgcaagttggaggcttgctgtggcaagcacacaacatctttggctttgagaccattcctgaagagtgcgttgaagcaacaaaggaatacatccatggcgaacaatatagatcagactccaaaacagttaaccaacaacttactttt

SEQ ID NO: 10923 - DNA, 280 bp, Glycine max
  Clone ID: 701063825H1
gttgatcgagataactagaaacagtgtgatgaaaatgaaggtccttgttttcttcgttgctacaattttggtagcatggcaatgccatgcgtacgatatgttccctctccgaatgaacactggctatggtgcccgtactccggaggtgaaatgcgcaagttggaggcttgctgtggaagcacacaacatctttggctttgagaccattcctgaagagtgcgttgaagcaacaaaggaatacatccatggcgaacaatatagatcagactccaaacagtta

SEQ ID NO: 10924 - DNA, 274 bp, Glycine max
  Clone ID: 701063826H1
taacaaactcatagtcttgcactttgcgagcgccaagactcgagtttcagccacacccgctgcgggagactcagattaggtgtttcctaagaagaatagtttccatcgagtctcaattgtgggtggaacttcaaagatttgtacacatcatggtgcggcatcagagaagaaggtgccaccaattggagatggagtatcgaacaatccttaagtttcatgaacaaggaagaaactactgttcagttttctcatccttggcccaaatgggccaact

SEQ ID NO: 10925 - DNA, 276 bp, Glycine max
  Clone ID: 701063827H1
tgaagctgctgaaattctggattatattgaactcttcaaagtcttcctaagactaagctgttggatttgttccaaagcaaatatgtgccctctgtagttattggggtcggcttaatggcatgtcaacaatctgttggaattaatggcataggattctacacagctgagatttctgtagcagctggactttcttcaggaaaagctggtaccatagcatatgcttgtatacagattccatttacattattgggagccatttgatgaacaagtcggaag

SEQ ID NO: 10926 - DNA, 284 bp, Glycine max
  Clone ID: 701063828H1
tgggagggtccgaagaagcacaacgttggacgaagtgattctcgttctgttcttctactcacaagagcaaccatcacaacatcagaatcagaaacagcaatggccaacactaacttggacgatgttccctctctggatctcatgactgagactcttcgtcgcttcaagtgctcttccaaacctgacaagcgtcttattctcattggcccacctggatctgggaaaggcacccagtcaccaatcataaaagatgagtactgcttatgccacttagctctggtgat

SEQ ID NO: 10927 - DNA, 286 bp, Glycine max
  Clone ID: 701063829H1
ctttgccccttttgttgccctaatttcaaccatgcctcgccgtagctccggtggaagatctgcccgtcctgctcctcgggcagctcctcgtcctgctccagttcaccatgctcctcctccagcccctgctcagagtggtggtggatctatgcttggtggcattggttcaaccatagctcaaggtatggcttttggcaccggaagtgcagtggcacacagggctgtggatgcagtcatgggtcctcgtaccattcaacatgaaacagttgttacagaggtgctgctg

SEQ ID NO: 10928 - DNA, 283 bp, Glycine max
  Clone ID: 701063830H1
caattatatataatctcctgctgactcgtctttttctttggaataatgatatactgtcaaaaaccatatataatctcctgctgacacatctttttcttttcttttctttatatcattttccttattagtttctttgtttactgcagtgacgagcttaggaaaattgttacttctgacctgagaaagttgttgggagcagagggggaaccaacatttgttaaccatttctattggagtaaaggctttcctttgtatggacgtaactatgggtcagttcttaagc

SEQ ID NO: 10929 - DNA, 239 bp, Glycine max
  Clone ID: 701063832H1
tgcacgaagccacgcatgataataacaatacccttcttcgtttcttccctctccactcggcactcacaattctcaacccaaccaccccctattaaccctcaccgcaatctctgattcgatcttcttcaatttcggggtttcccatataccacaaggcataggcctgtgtgaatttgcgatatgctgggtaattgtcgccaagacccaatctcttgggtactcctttaccaacccccacc

SEQ ID NO: 10930 - DNA, 282 bp, Glycine max
  Clone ID: 701063833H1
ctcacacacaccactttatatacgcacacgagagtcggaagcactactctcttcgccgcttgctctctctctctcgctctttcagctttgactttggtggaaactaaagactagtcaaaatggtgaagttcacagctgaagagctgcgtcgcattatggactataagcataatatccgtaatatgtctgtcattgctcatgttgatcacggaaaatcaaccctgactgattctcttgtggctgctgctggtattattgctcaagaagttgcaagtgatgccg

SEQ ID NO: 10931 - DNA, 286 bp, Glycine max
  unsure at all n locations
  Clone ID: 701063834H1
cttaaaatccagagaaaaatcactctgtngctttctcccacttctggtgttattcaatttggaaaaatgacgcataaatcccaaactgaatctgaaattttcagatctcttactttcacaccccttgtcgcaaaccaagacccgacacagacccagtcttcaatcaacgttaattccgtcaaaatcaacggcaaaacgcgttgcctttgacacccccttaggtgggggcgcgtactgagcacggtcgtgccttacaccactctccaaacctcgatctagataactt

SEQ ID NO: 10932 - DNA, 281 bp, Glycine max
  Clone ID: 701063835H1
acccactcctttctctgtctccatcgtttcgcattgcacaagcactctctctttcccttaccctttttcaggtttcaacgctccaactatccatggcaaaccgctggctcagacccgaggtgtatccactgttcgctgcggttggtgctgctgttgggatctgtggattccaactggttcgtaatatctgcatcaaccctgaagtcagggtgaacaaggagggaaggaaggcaggagttttggagaactttgctgagggagagaagtatgccgacacttcc

SEQ ID NO: 10933 - DNA, 210 bp, Glycine max
  Clone ID: 701063836H1
tactataatagcagaatcgtgagtcacagagagcagcacaccgataaatcgctatgactgctcagacccaagaggagcttcttgcggccgaccttgagcaacaaaagatccatgatgatgagcctgtagttgaggatgatgatgaggatgacgaagatgacgacgatgaggatgacgacaatgctgaagaaggtgatgcatctggtaggt

SEQ ID NO: 10934 - DNA, 281 bp, Glycine max
  Clone ID: 701063839H1
cttcctctaccgctttcttcctcctcattaaggcgcaactctctctctctctttctttttctttgttaggtttggtgacacttagttagaaagagcgtgcgaagagggtggggagaagatttagtgttgtggccatggcggagtctgagaagagtactgtgcttgttacgggagccggtggtcgcacaggacaaatagtttacaaaaacttaacagagaggccaaaccaatatgtggctagaggtctggttagaacagatgacagcaaacagacattggtg

SEQ ID NO: 10935 - DNA, 279 bp, Glycine max
  Clone ID: 701063840H1
tgatactcctgatatcagaaaaagaaaaaagaaaaaaatgtctctagtgactgcagagatcaaagccaaagcagaggtgtatcatggagatgaactctgccaagagaagtcaaagttgctgctaaaggaggtagggctacctaatgggcttttgccattgaaggacattgaggaatgtgggtatgagagggatagtgggtttgtgtggctgaagcagaagaagagcacaaaccacaagtttgagaagattgggaagctggtttcctatgctctgagatc

SEQ ID NO: 10936 - DNA, 277 bp, Glycine max
  Clone ID: 701063841H1
attgataatcagtttaaggtctttaagctcatctttcaagcgattgataaggaaaatgacagtgctattatcaaatggacaattgaatatgagaggattggtgaggaagttgatcctccatatggctacattgaatacgtccacaaatgcactaaagatattgatgctcatcttctcaaggcataactccaaataaacaatataattaacaagaaataatggactttgccttattatctttataatcgagaaggatatgcttgctaagtcttcgatt

SEQ ID NO: 10937 - DNA, 274 bp, Glycine max
  Clone ID: 701063842H1
gtggagaaaacggacatgagggcaaagagaatggcacgtaaggcaggagcattggtgatatttgttgttgatgcaagtggaagcatggcattgaacaggatgcagaatgcaaaaggtgcagcacttaagcttctggctgaaagttatacaagcagggatcaggtatctataattccattccgtggagatgcagctgaagttctcctgccaccttctagatcaatttcaatggcaaggaaacgtcttgaaaggcttccatgtggtggaggtcccc

SEQ ID NO: 10938 - DNA, 278 bp, Glycine max
  Clone ID: 701063843H1
tgtgtcttgtttttcttttctctctctctaattttccgggaaaatttctctcactcttgctctctggttttccggcgtcagaggaggaagcagaagagtagaaggaagacatttctctgcttctacggaaactcttcccttcacttccttccctttcttttctcaatttccgtgatcatcacaattttcttcactcctcaatttcaataatcctccatgaaccccctctagcccctcctctccttccttctcttcaacaagaaactgactaatatgga

SEQ ID NO: 10939 - DNA, 277 bp, Glycine max
  Clone ID: 701063844H1
ggaaaatttattgctgtccgtgaaccaacattcgatatcttggcttggagaatatgacaagaatgttgatggttactgatgtacaagatatcattaaaagacatcaagctcagattattacctcattgaaggatcctgacatcagtattcggaggcgtgctctagatttgctttatggcatgtgtgatgtttcaaatgcaaaggatatagttgaagaactactgcagtatctcagcacagcggagtttgcaatgcgtgaggacttgtcactaaagca

SEQ ID NO: 10940 - DNA, 282 bp, Glycine max
  Clone ID: 701063845H1
gactgagaggaagagagagggagattctttgtttgctaccttctctcggaaaaatggttacgttcaggtttcaccagtaccaggtggttgggagggctcttcccacggaagcagatcagcaccccaagatctaccgaatgaagctctgggccaccaacgaggttcgcgccaagtccaagttctggtattttctgaggaaactgaaaaaggtgaagaagagcaatggccaagtgcttgccatcaacgagatttttgagaagaacccaaccaaaataagaacta

SEQ ID NO: 10941 - DNA, 109 bp, Glycine max
  Clone ID: 701063846H1
ggacattgaacatagcatgtcttctttccaagaacaggatccatcatgacacacatggcttctttgagggctttgctattattgcaatagtgatcacaatccacacaac

SEQ ID NO: 10942 - DNA, 123 bp, Glycine max
  Clone ID: 701063847H1
ctgaaacttgggtgcgattccttcactcacaaaacaacacatcactatggctcttctgagtcgagcctcttcacgcttccctcagctggtttcccctcaaagggtagtttcactccacacaac

SEQ ID NO: 10943 - DNA, 237 bp, Glycine max
  Clone ID: 701063848H1
ctttgcctctgacccagtttaggtatggcttcgaaacgcatcctgaaggagctcaaggatttgcagaaggatcctcctacgtcatgcagcgcaggtcctgtggctgaagacatgtttcactggcaagccacaatcatgggacctgctgatagcccatatgcaggtggtgttttcttagtttcaattcattttcctcctgactactccttcaagacaccagaggttgcttttcggact

SEQ ID NO: 10944 - DNA, 283 bp, Glycine max
  Clone ID: 701063849H1
gcggaggaggaagaaccgtcaaacgcaagaatagagattatggttgaaggagtggaaatggaaagcgattactctgaatgcacttctgccgctgacagaagcgcgtcttgctgtcgatcacttgcaatagcttgctcacatatggaacggaagattacccatttacactactaactgtaattatattaaaggctagcggaattattataccaatgtacatagttattaagattatcggagccattcagaacagtattcagcactatcaggattctgctatgac

SEQ ID NO: 10945 - DNA, 275 bp, Glycine max
  Clone ID: 701063850H1
cacgaacaacttgagatccaaagaaagttgcagattcaaattgaagaccaagggaaacgtcttcagatgatgtttgagaaacagggagagatgggtgacaacaaggttaatggctcctcggacacaaacgaggaaggcgacaaatttgaaagcattccaaaagccatgcctgaagagaaggattcaagcacaagacaacaaatagcaggtgaagctgaagaagtgatcaatgaagatgaagctgcaccacccacaaaacgggtgaaaagttcata

SEQ ID NO: 10946 - DNA, 279 bp, Glycine max
  Clone ID: 701063851H1
gcttcttgttgttggaaagaaaccctagcaagcggaacaatggcagacgttgaggtcgatgtggcggctgcagcagcagcagggcagccgaagaagagaacgttcaagaagttcagtttcaggggcgtggatctcgatgcgcttctggacatgtccaccgatgaactcgtgaagatgttcagtgctcgcgcacgtagaaggttccagagaggcctcaccagaaagcccatggccttgatcaagaagcttcgcaaagcgaaaagagaagctccccaggtg

SEQ ID NO: 10947 - DNA, 280 bp, Glycine max
  Clone ID: 701063852H1
caaaactcaagcattgcatccctcttgatttgtagtttgttttgtgctttagataaaagttctgccaaatcaagaggggttttaagatcatagtgtgtgttttgcaacaatggctaagttctttgctgctatgatcttggcactctttgccatttccatactccaaacagtggtaatggctcctcaatgaacaaggaggccacttgtatgacaacaagagcaaatatggaagtggaagtgtcaagagttaccaatgcccatcacaatgctcgggagatgt

SEQ ID NO: 10948 - DNA, 72 bp, Glycine max
  Clone ID: 701063853H1
tcaaggcactgcttaagcttcaacggaatattaacatttaacaccatggaagccgtccaactcatgtccaca

SEQ ID NO: 10949 - DNA, 131 bp, Glycine max
  Clone ID: 701063854H1
gtggacagtggattgtttttctgcttcgaaatcaaaggcgtcaccggttttgtcggttaggctcataattgtgggatgtctgtttctcatcacgcatgtgtacaagggctccacgcgggtttggtagcatt

SEQ ID NO: 10950 - DNA, 277 bp, Glycine max
  Clone ID: 701063855H1
ctgctgttcctgcgcgtgaacaagctcagccaaagccatggttacgcataccaatgttatccccaacggacacttccgtaagcactggcagaactatgtgaagacctggttcaatcagccagcacggaagacaagaagacggttggctcgtcagaagaaagctgtgaagattttccccagacctacagctggacctcttagacccattgtacatggtcaaactttgacatacaacatgaaagtgagagctggaaggggattttcccttgagaactca

SEQ ID NO: 10951 - DNA, 273 bp, Glycine max
  Clone ID: 701063856H1
gagaggctgaatcaggaggaaagctcggggaattggattcatatgagattgaaggtggcgaaacaaaagctgaaattcttcagaatctggctgagttccagttttcttgtgtgatgtacaatgccgtgttggagaatgcctgtagtgagcaaggagcaagaatgtctgcaatggacagctctagcaggaatgctggggatatgcttgatcgtctcacgctcacctataacagaactcgtcaagcatcaatcaccactgaattgatagagttat

SEQ ID NO: 10952 - DNA, 274 bp, Glycine max
  Clone ID: 701063857H1
cagcagatcaatctctctctctctctcaaccataatagtcatgggtttgaaggaggattttgagcagtatgctgagaaagcaaagactttgccaccgactcaatcaaacgaagacttgcttatcctttatggattgtacaaacaggccaccgttggacctgtcaacaccagccgtcctggaatgttcaacatgagggacagagctaaatgggatgcatggaaggctgttgaagggaaatccaaggacgaagcaatgggtgattacacattaagg

SEQ ID NO: 10953 - DNA, 268 bp, Glycine max
  Clone ID: 701063858H1
tcgagctaacacaagttgtactgagtccacggtctggaagctagatgcctttgatgattcaactggacagtggtttgtgaccactggtggtgtgttgggaaaccctggcaaggataccatcgacaactggttcaagattgaggagtatgatgatgattacaagctcgtgttttgccccacagtgtgcaacttctgcaagcctttgtgtaggaatgttggggtgtttagggatagtaatgggaaccagcgcgtggctctcatgatgagc

SEQ ID NO: 10954 - DNA, 277 bp, Glycine max
  Clone ID: 701063859H1
ggaattaccggaaacaaaggtcgctgctacgatttctggatggatttcagcgagtgcatgtctcgctgccgtgagcccaaggactgtgcttttctccgcgaagactacctcgagtgcctccaccattccaaagagtttcaacgacgaaaccggatttacaaggaggagcagcgcaaactaagggctgctaccaggaaaggccaggaggatggggttaatgaacatcatcattagaacctggagttaattttcaatctaagcttctgaacattatttt

SEQ ID NO: 10955 - DNA, 276 bp, Glycine max
  Clone ID: 701063860H1
aaagtaggatacaaccctgacaagatccttttgttcctatctctggttttgagggagacaacatgattgagaggtccacaaaccttgactggtacaagggtccaactctgcttgatgcacttgaccagattagtgagcccaagaggccctctgacaagcccctcaggcttccccttcaggatgtgtacaagattggaggtattggaactgtgccagtgggacgtgttgagaccggtgtcttgaagcctggaatggtggtgacttttgaccaactgg

SEQ ID NO: 10956 - DNA, 277 bp, Glycine max
  Clone ID: 701063861H1
gtcttcctctgtcaccaatggcgatgattctctcactggccacatcatatctacaactcttggaggcaaaaactggggaacccaaacagactattagttacatggctgaacgggttgtaggaactggatcatttggaattgttttccaggcaaaatgtttggaaactggggaagcagtggccattaaaaaggttttacaagacagaagatacaagaatcgtgaactacagttaatgcgtgttttggatcatccaaatgtcatctctctgaagattgt

SEQ ID NO: 10957 - DNA, 279 bp, Glycine max
  unsure at all n locations
  Clone ID: 701063862H1
ctcgagccgttgtgctctgctcgtgctctagggttatcatatctccatttccatttcctctctctcagtttccaagaatcttaagctatgggaaagtcttacccaaccgtgagcgctgattaccagaaggccgttgagaaggcgaagaagaagctcagaggcttcatcgctgagaagagatgcgctcctctaatgctccgtttggcatggcactctgctggaacttacgacgtgagctcgaagaccggtggtcncttcggaaccataaagcacctccga

SEQ ID NO: 10958 - DNA, 237 bp, Glycine max
  Clone ID: 701063863H1
ctcgagccgatgctgccgctgcagccgcacccgccgccgaggaaaagaaggaagaagtgaaggtagaaagcgacgatgacatgggtttcggcttgtttgattaggtcttttttatatagttgtagccagattttgagtctttgaattgaaaacttgttttgttctataaaatttttattgaagagattcttagccaatcgactatcacaattgttgaattttgttggttttttaata

SEQ ID NO: 10959 - DNA, 278 bp, Glycine max
  Clone ID: 701063865H1
gttgtgaaacaggctgcaatctgacttgatggctttgatgatgagtggagattctgggatatctgcgtttcctgaggatcacaacatattcttctggaagggaacaataacaggaagcaaagatactgtgtttgaaggcacagagtataagctatcactctccttccccaatgactaccctttcaagcctccaaaagtcaagtttgaaacaacctgcttccaccccaattttgatgtgcatggcaacatatgcttggacatactccaggataatggtc

SEQ ID NO: 10960 - DNA, 274 bp, Glycine max
  Clone ID: 701063866H1
gtgacgagcatcatggcctcgagagcagtgctattgttggctatgtgtgtgcttccggccatggttgtggccattcgcccagcaaagaaccctttttgcgtgaagggtcgcgtctactgtgacccttgccgtgctggttttgagacctcagcaaccacctacattgccggtgctgagattatgttgcaatgcaagagcagggttagcaacgaggttgtgtacaccaagaaggggtacactgactcaaatggagcatacacaatgtacgtgacga

SEQ ID NO: 10961 - DNA, 276 bp, Glycine max
  unsure at all n locations
  Clone ID: 701063867H1
ctcgagccgcaaggtatcatcanaaggcatagttatattaatgtgtgatgtgttagaggatatgcgcattggtgaagattgaaattagaagcaagaatgaggagggcatgcaggaaaatatggcgatcggtgccttgcacgagcaggaaaagcttgcgaaatgactctaggaaggacatggaggagattctgagggctaagctttcaactattaaggaagagccagaattgtgtgatgagaacttagcatcaccaagacatgtgtgtatgccaaga

SEQ ID NO: 10962 - DNA, 173 bp, Glycine max
  Clone ID: 701063868H1
gactattaattcctattagagagtcttgggctagagatggcaaatggtgaccaagaggatggctacgacggggaagaaggaagggaacaacttgctagggttgccgaatttcacagaattaggaaacgggcgtttcaagtgcttagaaacagggcacgaggtcctctcgaagg

SEQ ID NO: 10963 - DNA, 273 bp, Glycine max
  Clone ID: 701063869H1
ggagatggctctgggaagaggcgtgcagtggttctactactttgcttcttgctgcttcactctcagatggctcgtgctgccacctacacagttggagattctgggggttggacctttaacactgttgcctggcccaaaggaaagctctttcgggctggtgacacacttgctttcaattatagccctgggactcacaatgtggtggccgtgaacaaggctggatatgatagctgcaagactccaagaggagccaaagtgtataagtcaggacgg

SEQ ID NO: 10964 - DNA, 274 bp, Glycine max
  Clone ID: 701063870H1
cgaatatcttgttgtttggagcgatccgagaaaaactctgtaaacatgttggtttaccaggacctccttacaggtgatgagcttctctctgactccttccgttacaaggaaattgagaatggaatgctgtgggaagttgaggggaagtgggttgttcaaggagcagttgatgtagacattggtgcaaacccttctgctgagggtggaggagaagatgagggagttgatgatgcagctgttaaggttgttgacattgttgacacattagacttca

SEQ ID NO: 10965 - DNA, 274 bp, Glycine max
  Clone ID: 701063872H1
gaggaaacaagccagcaagctcagagagcaagttgccaaacagcaacaggctgtaataaagcagttcagtagtagtggttatgagagttcagatgttgtggtcatcgatgaggtcgaaatgcagagacatcaccagctggaaaagttgtatagggccacacgttcagggaaggacttccagaaggaaattgttaaagcagcagaaacatttacagctataggttataagcatattgaaacaggaacaaaactttctgaggattgctgtaatatg

SEQ ID NO: 10966 - DNA, 271 bp, Glycine max
  Clone ID: 701063873H1
gtctttgccaggaggactaagcctatgataatgcctcagactggattgaatcttgatgggagtaatggatttcagaattctacctgtgcaattgcctcatcttcaaatgatgaaagcttggtgcggcatgcctttagttttccaaagcaatgcagcatctcaaataagtctattggtgtaccctccgtgaaaaacatagcaacttcggatacctcatccacttttcatccctctattaaggatgcactctacggcaacatgcccaaccgtt

SEQ ID NO: 10967 - DNA, 269 bp, Glycine max
  Clone ID: 701063874H1
atctgtaatttgtgtctgctcctcgctcttctccgccacttctgaatctattgaatcaacaatcatgtcggacgaagagcaccatttcgagtccaaggccgacgccggagcctccaaaacctaccctcagcaagccggtaccatccgcaagaacggctacatcgtcatcaaaggccgcccctgcaaggttgtggaagtttcgacttccaaaactggaaagcacggtcacgctaagtgtcactttgttggaattgatattttcatgccaa

SEQ ID NO: 10968 - DNA, 274 bp, Glycine max
  Clone ID: 701063875H1
cctgcattcaaaagccgtaggacaccacgtcgtgcaccgccgcgtgccaccacccactaaaccaccaacctccacacccagcccaacacaagcatcgttgtcggttttgtttctcttcctccctctctggttttgggtcttggagtgtccttctagctcttccaacccaattcgcggagatgaagtaagaatcacagtataaccatctaattggtatcttcaagaaacaataatgtatattttatggttttcgaggtctttgcaacgtgagtgc

SEQ ID NO: 10969 - DNA, 272 bp, Glycine max
  Clone ID: 701063876H1
aaaatacacagtgagctctcgctctagccctagggcgctgctcccgattttctctcttcggattgagtgaattgtgaaatgggttggaaagctgctgagaaactcattaggcactggaaagttgtcagaggggataatgttatgataataaggggcaaagataagggcgagactgggactattaagcgtgtcattcgctctcagaatcgtgtcattgttgagggtaaaaatctggtgaaaaagcacatcaagcaagggcaaggtatgaaggg

SEQ ID NO: 10970 - DNA, 277 bp, Glycine max
  Clone ID: 701063878H1
ctcttgctttgcttcctcttctatttgctttcttgttagctgccactacggaatcaagaaaagatccaggggaatattggaaaatgatcatgaaagatcaggaaatgccagtaggacttcaaggtcttgtttcatttcaatctgaaaataaccctaagactcaagagcagcttggtaaaggttccaaaaaccattgtgaagagtctctagttacaaatacacaagttaacagtgacttcgaacccataccaagtgttaccaaatatgatgtttggaa

SEQ ID NO: 10971 - DNA, 219 bp, Glycine max
  Clone ID: 701063880H1
gaaaattaagaggcgtagttacccacattgttgaggcgtagttactcaaaatgttgatgggctatttagttactcattgttgatgatgtattaccttacctcggattagtaaaagagaaaattcgtgacgtactcatcaccgtcggtggactacccgtagtagtaagagagtaaaacatgtgacttaatcttatttataaaagaaatgtttggcttttt

SEQ ID NO: 10972 - DNA, 276 bp, Glycine max
  Clone ID: 701063881H1
attgtttttggctaagcctcgaaatccagaaaaatcgtgagcgaagatgatgcacatgaccttttactggagcaggaaggtgaatctcctaatagattcatgggagaccaacgattggacggagtatctcatcactctgctcgcatgcctcgtcgttgccgccttctaccagttcctagagaatcgccgcatccgcctcaagctcatcggcgccggaaatcccttcccggcagagatcgacggcccgcttctgagacggaagcttgccgaaaccgc

SEQ ID NO: 10973 - DNA, 220 bp, Glycine max
  Clone ID: 701063882H1
agcgaggtcaccagattttcctttgacactgaggtatgagttgttggtttgggtcgtgagcctgtttgggtttgtgcatttgtggactgtgaagcaagcgtttcacactttcctgtatatattactattattcccagagtttgtgtgtgaggcagcaacacacacagagaacaaaaggcaaagacagagagagaaccatgtcttcccaagcaaacgtcga

SEQ ID NO: 10974 - DNA, 273 bp, Glycine max
  Clone ID: 701063883H1
ctctgtctctctctctctctctcgatcaatcatggctttgcccaatcagcaaaccgtcgattaccctagtttcaaactcgtcatcgtcggtgacggtggtacaggaaagacaacgttcgtgaaaaggcatcttaccggtgaatttgagaagaaatacgaaccgaccattggagtggaggttcacccattggatttcttcacaaactgtggaaagattcgcttctactgttgggatactgccggacaagagaagtttggtggcctcaggatgga

SEQ ID NO: 10975 - DNA, 273 bp, Glycine max
  Clone ID: 701063884H1
gtgactcaacagaaggtaaagctacgacaagatagaagaggagcttgttacaggcttatctcgtgtatcttgggaaaaagtagatgttagcttccgcaatagcaagcatagattttcttctcatactatcattcaggtcaaagaccaaatcacacaaatagaaggggcggctgttatacagcatatgattgatcattttcttctctagaagctttttgcctctaaagtatgctccctgcttgggaatataagcttctcattggatgaaacaat

SEQ ID NO: 10976 - DNA, 236 bp, Glycine max
  Clone ID: 701063885H1
gcataaatttgagagaaaatctgcaaacatgttggtttatcaggacctccttacaggcgatgagcttctctcggactgcttccgttacaatgaaattgagaatggaatgctgtgggaagttgaggggaagtgggttgttaagggagtcgttgatgttgacattggtgcaaacccttctgctgagggtggagaagatgagggagtcgatgacgcagctgttaaggttgttgacattg

SEQ ID NO: 10977 - DNA, 265 bp, Glycine max
  Clone ID: 701063886H1
ggacatccgaatgaaacataggaggtgactttgccggcagaggaagttcctccggagcttccggagcctgcactcggaatcaattttgctagggatggcatgaaccgcagggactggctttctctggttgctgtgcacagtgattcgtggttgctctctgtggccttctatcttggagctcgtcttaaccgcaacgaaaggaaacgtttatttagcttgatcaatgatcttcctactgtttttgaagttgtgactgataggaacc

SEQ ID NO: 10978 - DNA, 158 bp, Glycine max
  Clone ID: 701063887H1
atcagtgcacaggtcacctaacacagtcacagtggatgactttgtgttctctggctttgtagactggacaatcaccacaacacacttgtcaactgctcgcatttaacctaccgcactttgttactgattttccaggtgtgaatggtcttgggtatctg

SEQ ID NO: 10979 - DNA, 249 bp, Glycine max
  Clone ID: 701063888H1
atttgcaagtcttgaagattattaaaattgacgcgaacacgaaaagactagaaaaaagggttaagaagtaaaagtttggtgtgaggtgtgagtgttctgcacgcaccgaatcaacaataatttctcaaacagcgttgtaaaagaaacacattagactaggcagataactatggctgtacattctgattcggcttcatccgagaagaaatcaagcaatggagtgaatgagttgctgacttttaatgctga

SEQ ID NO: 10980 - DNA, 267 bp, Glycine max
  Clone ID: 701063889H1
gtacacggtgcctcccaagtctggtttggctcttttcctaccaaggactttacctactctgcggacggggtattcggaagtgctgaagctgaagctgaagctgaagctagagatagtgagaggaactacactcttgtaggatgcacttgtgcccctgcgtttcagtaccaggacttcgagctcgctaagccttcttatctcctcgctcgttttccccaattccaccctctcgtcactgctctcacattccccgagtgactacactat

SEQ ID NO: 10981 - DNA, 264 bp, Glycine max
  Clone ID: 701063890H1
ctctggcattggcaagtttatgtaataagaaactattactttggaaatgcaaaatgagtaacatggttgccaattgcagtttggagaattgcaggttgaagtaaccccagataaggccaatattggggctgtaattgggtttctttttgggtaagttttccaagttaaacttgacttttataagaggatggagacaaggaaaactcaattcttgtttaaatttggaacataggattctttgttggcaaatagcgcgggggttca

SEQ ID NO: 10982 - DNA, 256 bp, Glycine max
  Clone ID: 701063891H1
cggctcgaggatcgttcctcgcttctggattggcatagagagcttgttcgcgaacatgattcagaagacacaaaaggaccctaccattgaagaaataaagagcttgctctgcctcaaacagcaacaacccgggtgggttcttctcagcaaaggatcgaacgtgaagctgttggggggtggggacccaatgctggccactgcagctgatttcgagatatggaaggaaaaggtgctggagaaagcagggtttaacgtg

SEQ ID NO: 10983 - DNA, 272 bp, Glycine max
  Clone ID: 701063892H1
gcgagacgagccgtttctattaatgaaggacaagtggctataacactacttgcattcagttagactttgatagtttgattagctctaataaggttaaggaccagagagagaaagagaaataagaagaaaaacacaagatgggttattggaagtctaaggttcttcccaagatcaagaaggttttcgagaagaatagcaccaagaaagctgctgctgctgaggccaccaagtcctttgatgagtcaaaggaggaatacaacaaacctttgaag

SEQ ID NO: 10984 - DNA, 275 bp, Glycine max
  Clone ID: 701063893H1
gtaaaacagagacgcaaaatgaagacgatcttgtcgtctgagaccatgaatattcccgacggcgtgagcatcaaggttcacgctaaggttatcgaggttgagggccctcgtggaaaactcgtgcgagacttccaccatctgaacttggacttccaacttattaccgacgatggcggtaaaaggaagctcaagattgattcttggtttggttctcgtaaaacctccgccgccatccgcaccgccctcagccacgttgagaatttgatcccggcgtc

SEQ ID NO: 10985 - DNA, 272 bp, Glycine max
  Clone ID: 701063894H1
cctcgagccgattcggctcgaggagaaattgagtttctgagataaccacttttctctttgattgcatcaatggcaaccgcgaggaccgtgaaggatgtttcgcctcacgatttcgtgaaggcttacgcctcccatctcaagcgttccggcaagatggagcttcctgagtggactgatattgtaaaaacagcaaaatttaaggaattggctccatatgatcctgactggtattatgttagggctgcctcaatggcaagaaagatttatttgaa

SEQ ID NO: 10986 - DNA, 276 bp, Glycine max
  Clone ID: 701063895H1
ctctaaaagagatctttttctgtctttgaagaaagaagggtctttgcttgattttggagatgtctctgctctcagatctcatcaaccttaacctctccgataccaccgagaaggtgatcgcagagtacatatggatcggtggatcaggaatggacctgaggagcaaagcaaggactctcccaggaccagttagcgacccttcagagcttcccaagtggaactatgatggttccagcacaggtcaagctcctggtgaagacagtgcagtgatttata

SEQ ID NO: 10987 - DNA, 279 bp, Glycine max
  Clone ID: 701063901H1
gaaccatgccaaacccatttctctttctgacttggtctctactcttcaaattccaccagctaacgctgcctttgtgcagcggttcatgcgcttcttggcacacaatggaatctttgagatccatgagcgccaagaagatcatgaactaacatatgctctaacccctgcatcaaagcttcttgtcaatagtagtactcattgtctatctccaatggttctagcgtttaccgatccacttcggaacgttaaataccatcacttgggggcatggcttcgtgg

SEQ ID NO: 10988 - DNA, 263 bp, Glycine max
  Clone ID: 701063902H1
tccgttagcgccgctgccctagaccaccgcaagcgacgtcgcacaccgccttcatccgttagggcaaacatgcgtcgaggccgtggcggtggctacgatcgtcacatcactattttctcccctgaaggacgtctctttcaagtggcgtatgctttcaaggctgtgaaggctgcaggaatcacctcgattggtgtccgcggcaaggcttcaatttgtgtcgttactcagaagacggttccggataagcttttggacaacacaag

SEQ ID NO: 10989 - DNA, 274 bp, Glycine max
  Clone ID: 701063904H1
tgagataactagaaacagtgtgatgaaaatgaaggtccttgttttcttcgttgctacaattttcgtagcatggcaatgccatgcgtacgatatgttccctctccgaatgaacactggctatggtgcccgtactccggaggtgaaatgcgcaagttggaggcttgctgtggaagcacacaacatctttggctttgagaccattcctgaagagtgcgttgaagcaacaaaggaatacatccatggcgaacaatatagatcagactccaaaacagtt

SEQ ID NO: 10990 - DNA, 274 bp, Glycine max
  Clone ID: 701063905H1
caaaaggccatataattttcttttatttgaaataatgtccgggatcatccacaagattgaggagaccctccatgtgggcgggcacaagacagaggagcacaaaggcgaacaccatggtgagcacaaaggtgaacacaaaggcgaacaccatggtgagcacaaaggtgaacacaaaggcgaacaacaccatggggcgcaccaggcgggacttgtggataagatcaaggacaagatccatggtgatggccatgacacgggtgagaaaacgaagaag

SEQ ID NO: 10991 - DNA, 273 bp, Glycine max
  Clone ID: 701063906H1
gcagcagagggagtagcggcattaaaaatgcagatcttcgtgaaaactctgacagggaagactataaccctcgaggtcgagagcagcgacaccatcgacaatgtcaaggccaagattcaagacaaggaaggcattcctccggatcagcagcgtttgattttcgccggaaagcagcttgaagatggaaggaccctggccgattacaacatccagaaggaatcaacccttcatctcgtcctcaggcttcgtggtggcatcattgagccttccctc

SEQ ID NO: 10992 - DNA, 264 bp, Glycine max
  Clone ID: 701063908H1
ccaagacaaagctttcgatccctgtaactgcgttcgactatttagggttttttcggagacaatggcggatgaatcggagcacacggcggcgcggctgccggcgaatcgctgctcgacaagatcgccgagaagattcacggccacgacgactcttcctcttcctccgattccgattcggataaaaaggaatcttcgtcgattaaggagacggttttccgcctctttggacgggcgaagccagttcactccgtcctcggcggcgga

SEQ ID NO: 10993 - DNA, 275 bp, Glycine max
  Clone ID: 701063909H1
cggtcctcaccgcatgcctctcgcgctgccgcaccattgcgctgcagcccgacaacgacgcggcggttcgcctcctctgcatagtcaacgctcgctccaagtttgaccctcctctgcctagcggttactacggcaacgcttttgccttccccgttgctgtcaccactgcggggccgctgtgcgataaccctttgggctacgctctcgcgttggtgcggcacgcccaagcggatgtgcactgaggaatacatgcactcggtggctgatttcatggt

SEQ ID NO: 10994 - DNA, 267 bp, Glycine max
  Clone ID: 701063911H1
tgcggctgctacttactgtacgagcttggttcttcaaatgagatccccttctgttggattcaccggaatacttgtgcttcttgttttcctctctgcttgctgttgcagttcttctacacatgggagtttggcaacggcgaaaacttttgccattataaaaccagacggcttgcttggtaactacacagatgatatcacgcgaacaattgtcgaatatggtttcagcattttcccggccaagattgttcaactcgatgcgggcactgt

SEQ ID NO: 10995 - DNA, 250 bp, Glycine max
  Clone ID: 701063912H1
ccatttatagatcatgatgattcttctggtagcaacctttctactaccaaacctcaaatcggtagccctaatcctagtcctccttcgaatggggcatctgttccttcaaacaggtcgccaactaaagattcgattgctgggggtgttgatttgcatcaaagcgcagtcgcagtaccatcactctttgaagaagatgttgcatttgtcggtgtcgaattcgacggtactgagccggctatggcacaggctc

SEQ ID NO: 10996 - DNA, 253 bp, Glycine max
  Clone ID: 701063913H1
cggcactctacaaagcaaagccacatgatgcactttgacggcttccagaaggctctggcggcgtttcagggccgctgctccacgctgctgggcagcctgacccgtctccagcccaaccgcgcgaggccaccatgggctcggatagcccagccctggggcggcaggcccatggccatgacggtggcggcaatcgcggcgcgcttagcgggaattcccgtttacgccctcagcaacgcttccgaggagtttctct

SEQ ID NO: 10997 - DNA, 275 bp, Glycine max
  Clone ID: 701063914H1
tcggctttctccttataaacttcttccgatgtgtttctctctttctctctccgtactcttgctttcttcataaaattttgcaatcggtttgacaactgaatttaaatttggtaatcaaattaataattgaaaaaaaaagaagaagaaaaaaagggtggggcggcatagccagatattgaacctgccctctgttcttaatctcattgtgcctcccctcagatctcgtcttcaatcggtgggtttcgacggaatctcgattgaagttttgatctttg

SEQ ID NO: 10998 - DNA, 268 bp, Glycine max
  Clone ID: 701063915H1
tcaggagatgcagatgatatatatttggcatactcagatttcaatcaattcttgcttggagattcatcttgtctaaaagagctaaatcagtggtttgctaagcaactggacacaggtccatttcgacttgttgctgaggcggggaaatctaaatgctcttgggtgaatcttgatgacatctcaaatacctatgttcgagatttggaaaaatcacatcatcaacgtgtatctgagttgcgacggcttcgctcaatatttggcgtaagtg

SEQ ID NO: 10999 - DNA, 268 bp, Glycine max
  Clone ID: 701063917H1
aatggctcccaagggtttactctttttggctgtgttatgcttctcagcactgtcactgagtcgttgtcttgcggaggataatggacttgttatgaacttctacaaggcatcatgccctcaggctgaagacatcatcaaagaacaagtcaagcttctctacaagcgccacaagaacactgctttctcctggctcagaaacatcttccatgactgtgctgttcagagttgtgatgcttcactgttgctggactccacaagaaggagcttg

SEQ ID NO: 11000 - DNA, 272 bp, Glycine max
  Clone ID: 701063918H1
tttcattgcagagtgttattttgagtatcagcatcaatggctccaattgcagtgggaaacgtgattccagacggcattttggcttacttggatgaagaaaacaaaccccaaactgtctccattcactctctcgccaccggcaagaaagtcatcatctttggggttcccggtgccttcactcctacttgcagcttgaagcacgttcctggcttcattgagagagcagcagagctgaaagggcagggtgtggacgaaataatctgtatcagtgt

SEQ ID NO: 11001 - DNA, 272 bp, Glycine max
  Clone ID: 701063919H1
ggaacatcctgttttcccaaccaacttgaagctccttctaccaaaaccaacagcatcatcatccatggcatctcaaggtcacggtaacaagctcatcgtttcaacatcaccaaagagtgatcgtggcggcggcggtggcggcacgggatcattgcccaaaggacagtgcttgtgctcaccaacgacacatgaagggtccttccggtgccgtttgcatcgtgggcatacagcttcaccagctaattggatgacacgctccaagtccatgcctg

SEQ ID NO: 11002 - DNA, 285 bp, Glycine max
  Clone ID: 701063920H1
gtcggcattcggctcactcgagcgactcggctcgagatcagactgggtctcatccttggcacctgctcaggaggcggagttttcaggtggcgatgtaaatttgggttgatttgcgcgttcttttcatgcccagcttgtcttggagggaatttaagtaaacaaggattgggattcaggcttggtggttaacattatgttctactggttgtgatggcccacgacgtgaagcataactggtttctgatttcgaaaaatgttatcaatgattgcagtcatcaaaattgg

SEQ ID NO: 11003 - DNA, 270 bp, Glycine max
  Clone ID: 701063921H1
ctcttgctttctctttctctttctctttctctcactttctttctttgtgtgcctcttacaatttcttatattataattgtaatattctcccacatagacatcccctgcttagtagtatataagaccaagagattagagttaccccaatagtccaatacttgttcacttggcacaaaattcaaaggctcatcaacaagtaccgatttcagttgcatacccaacatggcctcatggaagaagaccatcgccaccccattcaaaaaagcttgc

SEQ ID NO: 11004 - DNA, 226 bp, Glycine max
  Clone ID: 701063922H1
gtaccagctagcatatatagtttattaatcagttacatatatatacatatataccacctgatatataggcatatagccagttcggtaggtcggtaggtacatagtagttaagttaattcaatcatggaagaaagacatcaccgttgttccaacaattcaacgatgatcacaacaacaaagaaaaaaacgagcagaagaagtcccacatcggataagctgaagaatc

SEQ ID NO: 11005 - DNA, 260 bp, Glycine max
  Clone ID: 701063923H1
gcatttctatttctaactaattattgtgcttattattattgttgagaaagcaacgcatggcaaagttaataaaattctttgagttgaacacaggggccaagattccttctgttgggttaggcacttggcaagctgagcctggtgttgtcgccaaagctgtcaccacagccattctggttggctacaggcatattgattgtgctcaagcgtataacaatcaagcagagattggttctgctcttcggaagctttttgatgat

SEQ ID NO: 11006 - DNA, 273 bp, Glycine max
  Clone ID: 701063924H1
tgctgggttgcccgctcggcaagccggcggacgcggtacaccgtcgccggcatagcactgcgactaccagcggcggccataatcccgctaaggttcgggagaagcagaagcctctacacgccggcgacctttccggcgttataccggcaccagagcgccggagacctcgacttgactcattcactgcgagccaccaagggtggcctccgtggctaatggccgtcgccggcgacgccatccgagattggactcctcgtcgtgccaacacgttcg

SEQ ID NO: 11007 - DNA, 243 bp, Glycine max
  Clone ID: 701063925H1
cttgagccaaagctttgtattttctgcgataattttccattgggtggcagacagtctcaacctttattcgaaagagcacggctctgagttgagttgcgtgctcatgtgtggtggtgcgattatctccgacttcataccggcaggtcccgccagcggggcgcggcgcgtgaccgccgacatcctgtggccgagtttgaggaagcgcttctcgacaccgctgctggacgatgatttcgagctggg

SEQ ID NO: 11008 - DNA, 254 bp, Glycine max
  Clone ID: 701063926H1
cgctcgagccgcaaaacaattaaaattcaccgtcaccgattgattattctcatcgccgcgcacttgacagcttgaaccgagatacgattttctttttaaagcgtttaggcgaattcagcgagagttgcggctgggcatggccggtgacggcgcggcgttgccggcgcaggagaccgctttgtatgaccgtcaaattcgggtttggggcgctgatgctcaaagaagattaagcaaatctcatgtcttagtctatg

SEQ ID NO: 11009 - DNA, 269 bp, Glycine max
  Clone ID: 701063927H1
cgcttacatgttccaagatcaggcggtgcaggcagctgagctggaacgcactttcattgccattaagcctgatggcgtgcagagaggcctgatttctgagattatatctcgttttgagcggaaagggtacaagcttgtgggaattaaagtagtgattcctaaaaaggaatttgcccaaaggcactatcacgacctgaaagacagacccttcttcgatgggctgtgtgattttctaagctctggccctgttattgcaatggtgtgggaag

SEQ ID NO: 11010 - DNA, 268 bp, Glycine max
  Clone ID: 701063928H1
cctgaactcaaaactgaactgtcttcggaatctttctcgattctctgttttgcccttcgaaacacctgttacgcgccaccgcaagaaccttcccctttccctgggtttcgtcaacaattctcgtcaatatccaactctggccctcaaggctgcctcaggttctataccaagtgcagacacaagtcgtgccgatccggcggccgacaagtctgcgacatatcgtcataacatgacagatgccatgggtgctgttttgacttatcggcat

SEQ ID NO: 11011 - DNA, 262 bp, Glycine max
  Clone ID: 701063929H1
gctctgagactgagacaacaactaagggttattaagagagcgaccgagatacatagttagagcgagagcagagacaccgttcggtgctccgctgaattcggttgtggcccctgcgctccgctgcaattttacactcaaaaggacctcatgtctaacatagcggcgcacaaagatctgggccagctggacgtggatgcatctgatgagtcagctaacatgccatcaccccaaaagcaggcggcgtctgtacagccaaagtatg

SEQ ID NO: 11012 - DNA, 274 bp, Glycine max
  Clone ID: 701063930H1
gcgaaaccccaaataccaatccaatcctctcccaactcacaaagccatgtctccaggtcccgttgtcgacgcttcccctgacgttgatgcagagcaacaacttccctccgtcgatgacgccactcagaagacgataccccaaccacaggcggacgatgctccccttgtcgcggacttgacggctgatgacaaagacgacgacgatgccgacgacgacgacgacgacgaagatgacaaggccgacgatgctcaagatcaactaggtgcgcacctc

SEQ ID NO: 11013 - DNA, 279 bp, Glycine max
  Clone ID: 701063931H1
cgcctgcttcttcaccaccgtctccttctgcttctgtcactgttccttttcatttcttttcttttcttttcttccaacttcatcaccaagacatgtccatgtccatgtccatgtccacacttccctcctcaaccttcgcaaactccaatctctccctctctacctccttatcctcacaaaagctcccactttttcacacccttcacgccaaatcccttcccctcccctttccttatctgcgcattcaaaccccaccaccataccttcccccacctctct

SEQ ID NO: 11014 - DNA, 280 bp, Glycine max
  Clone ID: 701063932H1
tgcgtctctctctgaattgacaagcttaaagacaaagtcttaaatggctggtccaaggattgcccatgctaccttgaaaggtccgagtgtggttaaggcgataataattggaataacacttggcttagctgctggtagcgtgtggaagatgcaccactggaatgaacagcggaaaaccaggaccttctacgatttactggaacagggtgagatcagtgttgttgcagcggcacagtgaaaatgttcttgttttgttgcctatgctctccatttataggct

SEQ ID NO: 11015 - DNA, 272 bp, Glycine max
  Clone ID: 701063933H1
cagagggtggtgcattgatgggaagctcgatgaagctcaaaggctcgctggtgaaatgtatcgtggcggatttgaccttggtgtaggggcttacaatgccatgcttgattgcgtgtgcaagctttgtcgcgagacggatccgtttcagcttcattcggcggcggcgaaagtgctggtggcgatggagtaccgcggcgttccaaggaatacggagacattcaatgtgttgataacgaatttgtgtaaaattaggaagactgaggatgctttgg

SEQ ID NO: 11016 - DNA, 270 bp, Glycine max
  Clone ID: 701063934H1
cggctcgagcggctcgaggggcaactatgcttgaccccatggctgtcttcgctctgctctttgggagtgcattgtttgaggactacatagggcatctagctgtggcatcaatggcttcctctgagctagctgatggaactgaggatcctgataaactcaatgagaagctaaaggctgtccaaaaagaaagagaagaaaagctagcaaaaattttgagggattatcttggtcaatatgtccggggtgacaaaaaaggattcttccaacgcg

SEQ ID NO: 11017 - DNA, 268 bp, Glycine max
  Clone ID: 701063935H1
ggagctcaaggacctacagaaagaccctccaacctcttgcagtgccggtcccgtagcagaagatatgtttcattggcaagcaactataatgggtccccctgatagcccttatgctgggggtgtttttctagttactattcattttcctccggattatccattcaagccacccaaggttgcatttaggactaaagttttccacccaaatatcaacagcaatggtagtatttgtcttgatatcttaaaggcgcagtggcgcccagcattg

SEQ ID NO: 11018 - DNA, 268 bp, Glycine max
  Clone ID: 701063936H1
gcgggcgagaaccccacctgctccggcagcagctacagaacttagcggcaggtgaaatgatcgaacttgcagcgtaattatttcagtccagctgaaattgaaagtaactgctttctgagattctgcaaccgcatgaaaccctagaaatgagtgccgccagtggtgcatttggtggcaatagggggctccgtccagtgcctcccgaaaaggggatatttccattggaccacatgcatttgtgtgacctcgagaaaatagaatatctcaa

SEQ ID NO: 11019 - DNA, 267 bp, Glycine max
  Clone ID: 701063937H1
tgtcagactaaattatttccttgaagttggttctcttcatgggtaagacgttttcatggagttttcgttgcatttgagcaattcaaccttgtaaaaataaataggctttccataaaccaaatgttacttttaaatgcccaaagcttatcaagcctcttttcttgaatggggattggcactctttattgaggttttgacatgagacattttatatcttctgatttgatttgatggatattttctgcaatattcccttaatattttctg

SEQ ID NO: 11020 - DNA, 260 bp, Glycine max
  Clone ID: 701063938H1
gagagtgaataaatccagcattgttctgttctctgcaacattctccactctcaaccatggcttcaaagcttttactcatcactgtcttcgtttttgatttgattgcttttggacttgccgtggctgctgcgcagcgaagaagcaccgctagtgttgtgccggccaatgaaaagcattataattactgtgtctataactctgatatagcaactggctatggtgttggcgcatttttgtctctcttggttcgtcaagtcctg

SEQ ID NO: 11021 - DNA, 253 bp, Glycine max
  Clone ID: 701063939H1
gcaccgtggcggaattttcatgtagtggcctagcttgagatctgacaagaaagagcgagcatggacggtgctgattctcccataaatcttgaagagcaagtttgcaattggttttccaggaaggacatacccaatcatgaactgtgctataatgtcatatccaggttgctgcaaggtgaccacaaaaaaaaaaaaaaagtgttaaaatgttaaccctctattgcttcccattttgcatcaaaataataggggg

SEQ ID NO: 11022 - DNA, 263 bp, Glycine max
  Clone ID: 701063940H1
tgggcatacaattccaaatctagagttcccctaatccctatagatgaatctccattatgaggatatgactcttgcacgtggaacaagctgctcaaattgtagcctaatatggcttggtgttaatggatcttcagcctgactccatgtaagtcctcatgggaaatgtgttggtcagggcaagacaaaagttcaagatttgtgctgtggaaatttgagttcttcatgcaaatttctttccttttaattccaagagttctggatgg

SEQ ID NO: 11023 - DNA, 237 bp, Glycine max
  Clone ID: 701063941H1
gttgcaaacagaacggcaaaccgaagacaatccgagcccgacgaaaaatatgcgttacttgaatcgtgtttggctggcggccacggtggcggtcacgcacggccacaccgatcccggccacaagtgcaagacggcgctcaactccatccaccacaaccggagccgcctcttctccggcggagccctgtctgatctccggccgctgtccggcgtcgttggcactgacgtctctggcgc

SEQ ID NO: 11024 - DNA, 218 bp, Glycine max
  Clone ID: 701063942H1
tgtacgccactggccggcgtcggtgttgttggcattctgacctaaagcttgtgtctttctgcttcgtttgtatcttctgctgcgtcacgcggatccctttctgattcttccgtaaatttcgtctctgaaactcgggctaatacttcatctaccgatctctatattctggctgccggtttgcttttgatccggcttgggcgttttgctcgacttgattt

SEQ ID NO: 11025 - DNA, 267 bp, Glycine max
  Clone ID: 701063943H1
cggcctcaaaaactggggttcctgaggtttgttgtcgtttgagaggattcgatcggcgaatcttgttttcgacctcaaattgaattcaacagtgaattgctggcaggccaagggcacgaaccaaaaaatgggcgacacaaaccacgcgtccaccgtcgatgacgatttgctcctcaaaaacttcttcgccgaagttagcgaagttgaaagggctaacgaagtgcttaggattctctcttgttttaagttgaatccttttgagtatct

SEQ ID NO: 11026 - DNA, 262 bp, Glycine max
  Clone ID: 701063944H1
ctcgtactcatgcggtctgcaaccttaacctaagtgcactgtgcggtgagtttccttgggtacatgcgggaatggctaccgcgtctggcatgcctgagcaggagacacaggtgttttctggcaacaatgaccaatatcctaggttggatgtctacgtgtgggccatggatgagactcttgtattgctaaactccttgctgaaatcatcctatgctgaggcttttcacggtctgaaggatgtgcagacgggggtggcaatcgg

SEQ ID NO: 11027 - DNA, 263 bp, Glycine max
  Clone ID: 701063945H1
ggtaaactaggcgtaggcgggaagacgggttgacggcagaaaaaaagaaaaacacagaaatggcgggtgggaacaacagcagcagtaacaacaaccctgatgagttggcggtggggtgcttgctttcgatcaggacaacgttgggcgacgaattcgaaggccaggtcgtcaccttcgatcgcccctccaacattctcgtactccaggagccttccaaacctagccctcgtcgaaatcttaggttgctcaaagccaattacatc

SEQ ID NO: 11028 - DNA, 266 bp, Glycine max
  Clone ID: 701063947H1
gttcctgcaacgcactgaattcgatcaatcaatccatcttcaattgctttgtttcgatcggcggcaaatggccgatcagttatcgaagggcgcggaattcgagaaaaaggctgcgaagaagctcagcggttggggcttgtttggctccaagtatgaagatgccgccgatctcttcgataaagccgccaattgcttcaagctcgccaaatcatgggacaaggctggcgcgacatacctgaagttggcaagttgtcatttgacgttgg

SEQ ID NO: 11029 - DNA, 219 bp, Glycine max
  Clone ID: 701063955H1
ctcgagccgctcagcaacttgttgcagaacagctcaaggctcagcttcctaccaagccactccctccctctcaggctggtctattctcttctcttcaatttgcattttttctttaaagattcttattattgttattcccagcaagcaaattgttgacttcttttgtgctagtgcgggaagcaagacatgtaaattcacgcggtggtcgaggaagtggcc

SEQ ID NO: 11030 - DNA, 222 bp, Glycine max
  Clone ID: 701063957H1
ttgatcgagataactagaaacagtgtgatgaaaatgaaggtccttgttttcttcgttgctacaattttcgtagcatggcaatgccatgcgtacgatatgttccctctccgaatgaacactggctatggtgcccgtactccggcggtgaaatgcgcaagttggaggcttgctgtggaagcacacaacatctttggctttgagaccattcctgaagagtgcgtt

SEQ ID NO: 11031 - DNA, 257 bp, Glycine max
  Clone ID: 701063959H1
ggccgccgcgcaaccacgagacgcgtggcatcgttggttttcgcttcaattcatcttcgctcaaccttctacaatgttctaccgaggtcaatttgctgatggtggtgctgggcgtgcactggctgcaaaacgccagcgcactgttgatccaggatcttcattctatggtgcttccactggttccaattttctgtacaacccatctccttatggatatgtcagccaacctcctcctccaccttttcctgttgttcggc

SEQ ID NO: 11032 - DNA, 261 bp, Glycine max
  Clone ID: 701063960H1
ctaaggcttcagtgtagtctgtaatcatgtcaggcaagtatatcatttctgctattcttggctcatttggcgttgcatgggtttgtgattattctgtttcagacaaaaagctatttggcggttctacccctggaactattacaaacaatgcgtgggcagaagagactgacaaaaaattgcaggcatggcctcgtactgccggtccaccagtggtcatgaatcccataagtcgccaaaatttcattgtcaagtctcgcgctg

SEQ ID NO: 11033 - DNA, 253 bp, Glycine max
  Clone ID: 701063961H1
gcccggcaccgccctggccgggttgtcgtcttcatcggcgatcgcgcagaaaacatgggcactcgcgcacaacatcatcccgatggccactccgggcggcgccgctacctcctccaccgctaccaccacgaccaacgccgacgactcgatcttctactacgacgcggcggggcagcacgcgttcccgcgcgacacgccctgggccaacgacccccactacttcacgcgcgtgacgatctccgcactcgcgctc

SEQ ID NO: 11034 - DNA, 272 bp, Glycine max
  Clone ID: 701063962H1
cgctttgctattacctctttttccaaactctaaaaatttttagttccacaaaaccaaaccaacatggcagcagcctcggcctcatccaccatgatatcaacaccagccttatctccaagcacaagcatccaaaagcaccatcatttgacgccatccaacgtgtgctttcaaggccttagacccctcacacggttcacaaccaaagtgagcagcaccaccaaacgggttattccaacgggtggtgtcggtgttcgcgctgaactcaactcagc

SEQ ID NO: 11035 - DNA, 270 bp, Glycine max
  Clone ID: 701063963H1
cgacatcaccattcatccgatgcgttcgagaggcgcgaccgcggtgctatctcgtgccagcaggattcggtcgaagctgcaaacggcgctggaagccaccgttttggcggtggacgacgtgtcgtaccagcacgcgggccacgccgccgtgacgggtagttccgacaaagaaacccacttcaacctcaacatcgtctcccccaagttcgagggccagagccttgtcaaacgacaccgtctcatctacgacctcctcgccgacgagctcca

SEQ ID NO: 11036 - DNA, 264 bp, Glycine max
  Clone ID: 701063964H1
ttctaaaaagaattaaggcgaagagagagcaaatgtttgacgtactgaatatttattttactgtgacattgcagttgaacctgaatggttctggagctggagcttcagctcccagttcagccttctttgggaccagcttgacgaaggttattgcctcaagggtccccaacagcaaggtttccggtggcagcttcaagattgttgctgtagaagcgcagaacgcgattgccgcgacccagcagaccgacaaggacagatggcagg

SEQ ID NO: 11037 - DNA, 278 bp, Glycine max
  Clone ID: 701063965H1
ttcggctcgagctccgtattgttataaccctagctcggcagaactaccatctctcgtccattgtctgcgtctcactcatcctcaactcttcctctcttttcttccaaacccgaatctggattctcctctctcccgatttcaattctcacggtcttcaccgatcgccagatctctaagcaccgctcttgttttcatcgattaaataacaaacaaaaattggctcaattttattttaacatcctaaccaaaaacaaacttttcacccgattttaacattc

SEQ ID NO: 11038 - DNA, 265 bp, Glycine max
  Clone ID: 701063966H1
gcttgtgctgccttcgtttgcgtttttatcacagaggcattaacatatatatagcaagcctggcagtcacactctacgaccttagctcttcctctgggttgacgaaacttgatgagtaccttctcccacgcagttacatcaccgggtaccaagctacaaaggatgatcttactgtttatgcagctttgccaactgctccatcagatgaatatggcaatgtttccaggtggtacaagcacattgatgctttgttgagaatctctgg

SEQ ID NO: 11039 - DNA, 261 bp, Glycine max
  Clone ID: 701063967H1
gtgagctataagctagtttatcgtgaggcgcatatgaagttgtttgtcttctttgttgctgcagtagttttggtagcatggccatgccatggcgcaggctaccaaaggttccctctccgaatgacaactggctatggtgcgcgttcttcggaggtaaaatgcgcaagttttaggcttgctgtggaagcacacaacatccgagcctttaaaaccattcctgacgagtgcgttgaaccaacaaaggactacattaatggcgaa

SEQ ID NO: 11040 - DNA, 261 bp, Glycine max
  Clone ID: 701063970H1
gcaattggcttgatgggaattcgtgcatgttaaaattcatatatagttgcaatggctcgattttcattggatgcgatatcagacactggtgcctttgtgcgatctgcttccacattcagaaattggatttcgcgggacctgaattcgcaatttccaccagaatcagggcggtatcatctctatgtatcatatgcttgtccttgggcttccaggtgccttgcttacttgaatattaaaggacttaacaaagctatcagtttc

SEQ ID NO: 11041 - DNA, 224 bp, Glycine max
  Clone ID: 701063971H1
cggtgagtgcggcagcaaatagcaatagcaccgccaccgtcaccactgccactgccactgccactagcaacagcagactgggaacttgggcagcgttttctacgccgtcggcttttggctccgcgagaccggccaagccatcgatcgcctcggctctcgtctccaaggcaactacctctctcaagaacagctgtctaggcatcgacctctgatgaatctgttcg

SEQ ID NO: 11042 - DNA, 255 bp, Glycine max
  Clone ID: 701063972H1
tacgtgaggcgctagagaatgatgatgaagtctgctatgtgtgcagtggtggttgtcgcacttcttcttctggcggcggtggggcccatggctgaggctgtgacatgcaccccaacagagttgagtccgtgtcttccagcaatcacttccggtgctaaaccttccaatgcttgttgcacgacgctgaagcagcaaaaaccatgcttatgtggctacctcaaaaacgctagcttgacgcagtatgttaactctcct

SEQ ID NO: 11043 - DNA, 193 bp, Glycine max
  Clone ID: 701063973H1
atcggataagatgttgcaattaaaagcgcaaatcgcaacacttgagccgcgcgacgaacgatacaagactgtgtttgcagacagaatttcagtcttccggcgggcatgctgtgagctttttggttacaagattgtgcatggctgaacaccagcgttctaatggaatcccggtgacacgatttaccttgcaatc

SEQ ID NO: 11044 - DNA, 262 bp, Glycine max
  Clone ID: 701063974H1
ctggccgaccacatctaagttataatttggacatacccactcagcgggttgggacatatgatactcagttggtggcgcatttcttccaatccctggtgaacacgtctggtctgacacttcacattcagcagcttgctgggaaaaattctcatcatattattgcggcaaccttcaaagcttttgctcgggctcttcgacaagcaacagcgtatgatccacgtcgccgtggaactataccaagttcgaacggggttctgtcccg

SEQ ID NO: 11045 - DNA, 263 bp, Glycine max
  Clone ID: 701063975H1
gtaagcagcggctaccctaatcctctcctcttcctctctactaatttcagctatggccgacgaagctgtggttgttccagatcccacccagatcgatgtcaagctctttaaccgctggcgcttcgacgatattgagattactgacatttctctggctgattatatcggcgtggcgacatccaagcacgccacgtatgtgcctcacaccgccggcaggtactcggtgaagcggttcaggccggcgcaatgccccattgttgaga

SEQ ID NO: 11046 - DNA, 254 bp, Glycine max
  Clone ID: 701063977H1
cgaatttcattgcagagtgttattttgagtatcagcatcaatggctccaattgcagtgggcaacgtgattccagacggcattttggcttacttggatgacgaaaacaaaccccaaactgtctccattcactctctcgccaccggcaagaaagtcatcatctttggggttcccggtgccttcactcctacttgcagcttgaagcacgttcctggcttcattgagcgagcagaagagctgacagggccgggtgtgg

SEQ ID NO: 11047 - DNA, 252 bp, Glycine max
  Clone ID: 701063978H1
tgagtgcgttgggttttctctttggttttcctgagctgtgttttattctctttatctctctctctgccctctcatcttcgagctccgatggcgcgcctgtggcgcgcggcgaccggcatgacggaaaacgccaccgattacgacggcgtcgcgttctggtccaaccccgagcgcaccggctggctcaccaagccgggcgcgtacatcaagacctggcgccgccgctggttcgtcctcaagcaaggcaagctc

SEQ ID NO: 11048 - DNA, 245 bp, Glycine max
  Clone ID: 701063979H1
tgttcttctacgcggtgttcggcggtttgggagcggttgttgcagtgacggcgctgcgcaagcgcaacaaggcccgaatcaacacctcttccgcattcaattccttcaagaacaactacctcatcgtctattccctcatgatggctggcgattggctacaaggtccatatgtctactacctttacagtacatatggatatgggccgggcgacataggacaactcttcattgctggttttgggtct

SEQ ID NO: 11049 - DNA, 268 bp, Glycine max
  Clone ID: 701063980H1
cacacactaaaccaaagtacgaggtatagtgttctaagagtgcgccacttgtgcgccatggcttccaaggctgcacttctcttgtgtctcaatgtactctttttcactgtggttagttccacatatgtgccatgtaatccaccccccaaaactcccaaacacccacctgtcccaaagccaccatccccaaagctagcaagctgccccaaagacactattaagttcggtgtgtgtgctgatgtgttaggtttgattaatgtgcacttgg

SEQ ID NO: 11050 - DNA, 263 bp, Glycine max
  Clone ID: 701063981H1
ctgcgtctagtcagaaccctaatccgccgaaggcagttcaagcgagtgacagccaccagccatgggtcgtatgcacagccgcggtaagggtatatcctcttctgctttgccctacaaaaggacacctcctagctggctcacgatctcttcgcaagatgtcgaagaaaatatctgcacagtttgcgcagaaaggtttgaccccgtctcagattggtgtcattctcagagattctcacggtattgctcaggtcaatagcgtcact

SEQ ID NO: 11051 - DNA, 257 bp, Glycine max
  Clone ID: 701063982H1
tggcgatggaagtggagcagcatcagaatcatcaattaggcgtttcccttctggcaaccgctccgtcgcaggttcggacccgaatctcctttcttcgctcatggcaacctcgaacgggaacttctcgccaaacagcttgctttggcattaacagaagcgcaacaacagcttgagcaatggatgcacgaggaagacggacgggaagtcttttgtcccattgtgggttgtggtgcacgcttgacctcaatggcggactt

SEQ ID NO: 11052 - DNA, 256 bp, Glycine max
  unsure at all n locations
  Clone ID: 701063983H1
caacaaagtataagactttgctttgatttgcttcgccttgcttgttgttgtgtcaaccatggcgtcgtttgggtctctgaacatccaccattttcgcccaagaagagagaaaacagcagtatnagtcgcacattcgaggcctcaatgcatacgaccgtcacaaaaaattcatcgacgactacgttaaattttatggaaacgcaagaccttcaaacctaaagttgcctattaaaacagatcaagatacactaagaga

SEQ ID NO: 11053 - DNA, 253 bp, Glycine max
  Clone ID: 701063984H1
gggaacagagaaggagacagagaatggacgccattgattctgtgttcgatccgttgagagaattcgcaaaggacagcgtgaggctcgtgaagcgctgccacaaacccgatcgcaaagaattctccaaggttgccgtgcgtaccgcaattggtttcgttgtgatgggattcgtgggtttcttcgtgcagcttattttcattccaattaacaacatcatcgtcggatctggttaggatgacgggtactacaatcg

SEQ ID NO: 11054 - DNA, 241 bp, Glycine max
  Clone ID: 701063987H1
ggagaccgggtgtgagcctggcgcgcaaagaggccgctgtaagggctggcgcaactaagctctcagaaaggcaaccaactggtacagcagctcagggtgacaaggactacaaagaaccacccccagcacctctgcctgagcctggtgagctaaagtcatggtccttctacagagctggaattgctgagcctgtggccactctcctgctcctctacattaccatcttaactgtcatgggtgt

SEQ ID NO: 11055 - DNA, 259 bp, Glycine max
  Clone ID: 701063988H1
caacggtgatagctaagacggttggctttgcgatgattgatgcatttgctgagtcacaggggattcctatggacactgtccattccaaagccatttctggaaaaggttttgttggtgaagttcctgtttttcttgcaaagcctcaaacttacatgaatctcagtggtgaatcaacaggaccactggctgcttattataagctacctcttaatcaggtgcttgtgttccatgatgacatgaacttgccttgtggggtgct

SEQ ID NO: 11056 - DNA, 232 bp, Glycine max
  Clone ID: 701063989H1
cttttgttctttttggtgctttaatttgcactagcacgggggttggttttatttctgtttgcttgccacaatggctgtggctaataagttactttctgttttgatcattgccctcattgccatttccatgcttcaaacagtggttatggcatctcatggacatggcggccaccactacaatgacaagaaaaaatatggacctggcagtctcaaaagcttccaatgcccatca

SEQ ID NO: 11057 - DNA, 260 bp, Glycine max
  Clone ID: 701063990H1
ctcgagccgcacaagccaagtgaaagtgagacaaaataaaaatcaaagagcataatgtcagggctcattcacaagattggggagacccttcatgtgggcgggcacaagccggcggcggcgcataagggtgagcaccatgctggagaatacaaaggggagcaccatggtgaacacagtagtgagtacaaaggcgagcatcatggtgaacacaaagctggagagtaccatggtgagcacaagccagagcacaaagaggggtt

SEQ ID NO: 11058 - DNA, 258 bp, Glycine max
  Clone ID: 701063991H1
gaagagactggctcccaagggtttaatctttttggctgtgttatgcttctcagcactgtcactgagtcgttgtcttgcggcggctaatggacttgttctgaacttctacaaggcatcatgccctcaggctgaagacatcatcaaagaacaagtcaagcttctctacaagcgccacaagaacactgctttctcctggctcagaaacatcttccatgactgtgctgttcagagttgtgatgcttcactgttgctggactc

SEQ ID NO: 11059 - DNA, 260 bp, Glycine max
  Clone ID: 701063992H1
ggcgaatctagcacacttctccaagagagccctaagacgcgcacacgcgctcgcaaggcaccacgtgcagccgcagctgctggcagcggaacgcgcttttgcgacggaggcggcgaaatcgatatccccgtcggcggatcgcgtgaagtgggactaccgagggcagaggaagataatcccgttaggacagtggctccccaaagtggccgtggatgcttacgtagcacccaacgtggtcctcgccggccaagtcaccgtct

SEQ ID NO: 11060 - DNA, 262 bp, Glycine max
  Clone ID: 701063993H1
gttgaaaagaaaccctagcaagtggagcaatggcagacgttgaagtcgatgtggcggcagccgcagcagcagggctgccgaagaagagaacgttcaagaagttcagttttcgaggcgtggatctcgatgcacttctcgacatgtccaccgatgaactcgtcaagatgttcagtgcccgcgctcgtagaaggttccagagaggcctcaccagaaagcccatggccttgatcaagaagctccgtaaagcgaaaagggaagctcc

SEQ ID NO: 11061 - DNA, 263 bp, Glycine max
  Clone ID: 701063994H1
caaaacagttcccacaaaaaaaagcaaaccgaaaaacgaaaagcactaaaaaaaaatgacgcagggtttctcccttgtgctgctgattcttctgatccagtacaacaacgttgtcaacgcctacaacaacaaaaactgtgtcacagaggattgcctcatcggcaacacggctttggcatcagagttctactttggatcccatgtggccagaatgctctacgatgtgcgccaatctgtgcgtggcacaacaggcaataaaaata

SEQ ID NO: 11062 - DNA, 281 bp, Glycine max
  Clone ID: 701064001H1
caaagcctccaccaatgtcgctgctgctgccgccgccgaaacctcaccggagctccggtaactcccctggcgacagcattccagactggatctccgaatcaatcaacggcggctccctccgccgcgtcgacctcaactccggcaccaacggctgggcgtcgccgccaggctccgtgttctccctccgctccgaaagttactttcagaaccgccagaactctcccgccggcgactacctcctctcgccggcgggcatggactggctcaaatccgccgcgaaa

SEQ ID NO: 11063 - DNA, 288 bp, Glycine max
  Clone ID: 701064002H1
gcacgagattgacttttctcccctcataaaaaaaacctaccaatggctcccgcaaaggcagagaagaagcccgcggagaagaagccggcagagaaggccccagcggagaagaagccgaaggcggagaagaagatatcgaaggaaggaggaagcgagaagaagaagaagagaacaaagaagagcgttgagacctacaagatctacatcttcaaggtgttgaagcaagtgcaccccgacatcgggatctccagcaaggctatggggatcatgaacagtttcataaacgac

SEQ ID NO: 11064 - DNA, 277 bp, Glycine max
  Clone ID: 701064003H1
caaacgaccaaaaatgaagaatgtcgtggaaatgcttcgagagatacaagaaaattgagaacagcaagccactcaagtattctattctgtgctgtaatctacaccgttgaagatttgatgtatgcaaaactctcacggatacaacagagggactgatgagttacaacttacaacaactttaaagtagtagacttgtatgaggaattattccatgtggtgaagttggtgtgtcatagtaaattcaggcattgatagaaacttcacctttgtagtttgt

SEQ ID NO: 11065 - DNA, 275 bp, Glycine max
  Clone ID: 701064004H1
cgatccgcaagaacacgcaaacaccgatcaattaattttctttatgctagatggggagtgcatcagagttcgacccagcgcttgcgctttcccacaaattccctgatactacgtactcttataccgaaagggatgcagcactttatgccctaagcgtaggggtgtgtttgtcggacgctgttgacgctgatgagcttaaatatgtttaccatgaaaatggtcaggagtctatcaaggtcttgcctacgttttctactctacttgtacttagatct

SEQ ID NO: 11066 - DNA, 272 bp, Glycine max
  Clone ID: 701064005H1
actgaactcatctcactacattaatattcccttgggtttcattaattgtgcacatttagctttttttattgaaccgtgtcaatggccgctactatgaaggctttagcttttgttgctttgcttgttaccattaatgcaatagtgtgtgaaagtagagtggcgagaaaggaccttggattggaccttggtggggtgggaattggggtgggtgctggggttggactaggccttggtggtgggggtggtgctggttctggtgcaggtgcaggctc

SEQ ID NO: 11067 - DNA, 95 bp, Glycine max
  Clone ID: 701064006H1
ggcggcgtgcacctacgcgagcctggaggctgcggctgaaccctaacaaggagcacaagcccgacgggtacgaggacatgcaattggatttcagc

SEQ ID NO: 11068 - DNA, 177 bp, Glycine max
  Clone ID: 701064007H1
aagaggccctctgacaagcccctcaggcttccccttcaggatgtgtacaagattggaggtattggaactgtgccagtgggacgtgttgagaccggtgtcttgaagcctggaatggtggtgacttttgcaccaactggactgacaactgaagtcaagtctgtggagatgcaccatgaa

SEQ ID NO: 11069 - DNA, 269 bp, Glycine max
  Clone ID: 701064008H1
tttggaaacaacgggctagaatccgaggagggtattagcctactgatcagcagaaagctgctgaagctgatgaatggagatgttcgctatctaagggaagcaggcaaatcagcttttatcctctctgctgaacttgcagcagcccataatttgaaaggttagatcttatcggaaaaagaataacagatgatgcaaccagcaaaacacaatctgttttgtacatcataaagagaacggagctagaaattaattgcatccatgtaactcta

SEQ ID NO: 11070 - DNA, 117 bp, Glycine max
  Clone ID: 701064010H1
cccatactcaaactcactctttctaagtcttttctatctctttctctctctctctgtctgccatggttctctccaaaaccacctccgaatccgacgtctctgtccactcaaccttcg

SEQ ID NO: 11071 - DNA, 253 bp, Glycine max
  Clone ID: 701064011H1
attatcatcatttgttcattccgcttctaccgagttgtcaccacccaccggactcagtgaatcaccataatgggaaactgcagctcctccgattcgactcaggttgccacggcgaagtctgtgctgcaagatgggaggctgcaggagttctcgtacccggttaaggtttcgttcctcttgcagaagtatcccgcgtgcttcatatgcaactccgacgaaatggaattcggcgacgtcgtttcggccatcgacg

SEQ ID NO: 11072 - DNA, 260 bp, Glycine max
  Clone ID: 701064012H1
gtgaaaagtgaaaagtgaaaatggacttggaagcagtgaagaggtacttagagaaaggaggagaaacagcatcggcggtggatgggttgcctccgaggtttctggaaccgttaataatgaacgctcttaaggtcgatctcatcgaaactggtcgcgttgtctgctccatgaagatacctccgcgtttactcaatgctgggaattcgttacacggtggcgccatcgctgctctggtcgacgtggtggggtccgctgcgatt

SEQ ID NO: 11073 - DNA, 263 bp, Glycine max
  Clone ID: 701064013H1
gtcaaggaaaactaagttcttcagtcttgacttgagtgctttgagttcatggatccaatccaacacaagttcgtcaacgttggtgctctcaagctccacgtcgcagaaaccggaaccggtccaaacgccgtcgtattcctgcacggcttcccggagatatggtactcgtggcggcaccagatgatagctctcgccggtgccggattcagagcggtttccttcgattacagaggttacggtctctccgacccgccacccgaacc

SEQ ID NO: 11074 - DNA, 263 bp, Glycine max
  Clone ID: 701064014H1
aaaaaagttgtgctgtgccgcctcttccgtaggcagcagcaatggcctcaaatcccaaaactttgacctttgaggaggtagctaagcacaacaacaaaaaggattgctggattactatcaatggaaaggtgtatgatatcacaccatttttggatgagcatccaggaggtgatgaagttttgctgacgtcaacagggaaggatgccaccattgattttgaagatgtgggccacagtgattctgctatagagatgatggaaaaa

SEQ ID NO: 11075 - DNA, 260 bp, Glycine max
  Clone ID: 701064015H1
ctcgagccgcacaagccaagtgaaagtgagaaaaaataaaaatcaaagagcataatgtcaggcgctcattcacaagattggggagacccttcatgtgggagggcacaagaaggaggaggagcataagggtgagcaccatgctggagaatacaaaggggagcaccatggtgaacacagtagtgagtacaaaggagagcatcatggtgaacacaaagctggagagtaccatggtgagcacaagccagagcacaaagacgggt

SEQ ID NO: 11076 - DNA, 274 bp, Glycine max
  Clone ID: 701064017H1
cagagaagaacagagagagatccatccatcaattccaatggccgatcagctcaccgacgaacagatctccgagttcaaggaagccttcagcctcttcgacaaggacggggatggttgtattaccaccaaggaacttgggaccgtgatgcggtcacttggccagaacccaactgaggcagagctgcaggacatgataaatgaggttgatgctgatgggaatggtaccattgatttcccagaattcctgaatctcatggctcgcaagatgaaagac

SEQ ID NO: 11077 - DNA, 275 bp, Glycine max
  Clone ID: 701064018H1
tcaccaggcaggtgtcgcagtacgcggagaaaggacgctatatgaatatatttgtccccgatgctctctatttcagccactcgtatattcttcctccgctcaacaactataagattatcttcttcttcttcttctcttcaattcttctccaatcccaaccgcaccctcttccgtccctttcttcacacttccttcaaaccacttccttcgtctttctctttccgaacagatcacactatggccacctcaaacgccaaatcagtccatgatttcac

SEQ ID NO: 11078 - DNA, 273 bp, Glycine max
  Clone ID: 701064019H1
cagcgtcgcagtcgcaaccctaatcagaacaagcgcagttgcaagcgagtgacagccaccagccatgggtcgtatgcacagccgcggttccgggtatatcctcttctgctttgccctacaaaaggacacctcctacctggctcaagatctcttcgcaagatgtcgaagaaaatatctgcaagtttgcgaagaaaggtttgaccccgtctcagattggtgtcattctcagagattctcacggtattgctcaggtcaatagcgtcactcacagca

SEQ ID NO: 11079 - DNA, 270 bp, Glycine max
  Clone ID: 701064020H1
acctgcctctgttaaagtttgtatttttctgagtgggtgggttgattgagagtgctgtgcaagctttggaactttttcccaacctgctacttcaatggccactgaagaggttaacaaacctcaatcacttcctccataccctgagatgatagtgaaagcacttgaagcactgaatgagccaaatggatcgaacaagtcagcaatatcaaagtacatagaaaccacctacggtgagttgccagacgcaaccgttttggggagtcaccttaa

SEQ ID NO: 11080 - DNA, 264 bp, Glycine max
  Clone ID: 701064021H1
ctcttttgtagggcattgcatttctgaatgatcctaggaggctcaatgttgctttgacacgagcaagatatggcattgttattttgggaaaccctaaagttttgagcaaacagcctctatggaatagtttattgactcactacaaggtagttcttgtgttttgagattttactgtcggtggtattttttttggtttaaccagaggtatctgaggcttcttatttggcacccgactaatcctctcccattttggggtaagtggta

SEQ ID NO: 11081 - DNA, 264 bp, Glycine max
  Clone ID: 701064022H1
caaaaaagccactgagtgcgattcaataattgcgaaaaaccacggggagtgttgtttgtttcggtcccggctggaccagggaatgaatagagatgagaggctttcggcttaagaaaactgagttaagcggccaagccaaacgcagaatcggcggcagaaattgccaccggaagcacgtcgaagacgggtgaactaaaaagaagaatctcatccaccacttatccttccaatccccaaccccaaaaaattaccaattctagtagt

SEQ ID NO: 11082 - DNA, 271 bp, Glycine max
  Clone ID: 701064023H1
caaaaattgatacgaggctgaacagaattaagaagagtgtttcgtttctcgtctgatggtcgtgagtcgttccttcccactaacttcgaagcggagaagggtcaccagcttttgttccaccgacatggatgctgaaactgctaaggccaagcttgctgctgtgaaaagaaggtttgggacgagagatccatgtttttgaaacatcagttgtttccttatcttcaaaggctgcattatccaatggagaggagactgatgacttctatgagtt

SEQ ID NO: 11083 - DNA, 266 bp, Glycine max
  Clone ID: 701064024H1
cgaagagagaaaaaccatggcaataacactcaacaatggcttcaagatgcctatcattggattgggcgtgtggcgcatggaaggaaacgaaatcagggacctaattctcaattccatcaaaattggttatcgccattttgattgtgctgctgactacaaaaacgaagcagaagttggagatgcgcttaaggaggcttttgatagtggccttgtgaagagagaggatctcttcattaccaccaagctttggaattctcgatcaggcc

SEQ ID NO: 11084 - DNA, 264 bp, Glycine max
  Clone ID: 701064025H1
atttgcttcttcgagtttcacagccaagtcgtaaaacggtttcaagggatggaaaacatgcagagcttctggcaattgggtgatgaactccgtgggcactcaaaagcatcggaggatcacaagtggttaatggttgcctcgaaactggccgaacagacaagattgaagggggagcgtgtgaacaaccttgatctttcaaagggacccattgaaacaaggtcaagggataaatttgggttccaggaagagaacaaatttgattct

SEQ ID NO: 11085 - DNA, 172 bp, Glycine max
  Clone ID: 701064027H1
tcaaggatgatgagtgatttgtttttgtagtgatatatgctcgaggtttttattacttcatttctgcagaattagattatcatcttctgacttgtcctgtgactattttgataaagcactaaatacaacagaaaatctttagttaaatcattatcatattggctttgacgcg

SEQ ID NO: 11086 - DNA, 259 bp, Glycine max
  Clone ID: 701064028H1
gaggaaatgcaacttacttgctgatataaacttcagacagagcgagttgttgtaaagctagccttgttgcagccatggccacccacgcggctctagcttctacaaggatccccactaacaccaagttcccatccaaggcttcacactctttcccaacccaatgcgcctcaaagagacttgaggtgacagaattctctgggctaagatccacttcatgtgtgacatatgctaacgatgctagagaatcttccttttttga

SEQ ID NO: 11087 - DNA, 260 bp, Glycine max
  Clone ID: 701064029H1
ctcaatcgaagtttgagaagaagtttgggcaatcatctgttttcatagcttcaacactcttggaagatgggggtgttccaaaagcagcaagttccgcaacactcttgaaagaggccatccatgtaattagttgtggttatgaagataagacagaatgggggaaagaggttgggtggatatatggctcagttacagaagatattttaacaggtttcaagatgcattgtcatggttggagatctgtgtactgcatgccaaaa

SEQ ID NO: 11088 - DNA, 207 bp, Glycine max
  Clone ID: 701064030H1
cagaaatgttcatttcggtctcaatcttttgacagtctgtacctaattgactacattatgattttcctcttttgggggggggggggagatttcccaatttgtttgaggaaaactaagggttacactttgtggcagaaaatctgtgaacaaatgccgcttaatactgattttccaaatttgtttgaggaaaacccgaatttggaattt

SEQ ID NO: 11089 - DNA, 263 bp, Glycine max
  Clone ID: 701064031H1
cttctctcattctttttttctttctcttaaattaactacaaaaccaacaaccctcctccaacttcactcatattttttctttctcttaaacttttttaaggaaaaaaaaaatctaaatccttttaaaaccctattaatactaaacatcatataacattcattgttcatcaagaactatctttgtggtcgtgtttgttcaataatgctacaaaattcctccatgtcttccctcctcctccaccggatcaacggtggcggtggtg

SEQ ID NO: 11090 - DNA, 261 bp, Glycine max
  Clone ID: 701064032H1
cacacacacacacactcacacacacacacacactgggtctttgcattctgtggaagagcttgttgggttctctcagctttcacctttccaggctcggatccaaagaaaaatctcaactttcttcaacaattcatctccacaatttctgggtagtggctttttttagcaggaatggctcaacgttctaatgttccaatgttaggcaagagtgaagagaatgtttcagatacagctcattctgacaaagcccagaaaggtcag

SEQ ID NO: 11091 - DNA, 274 bp, Glycine max
  Clone ID: 701064033H1
ttcagattcccttttcagttttaattcaaaaccctaattttcttttttccaccctccagcgtcgccgtttctcaacaagtcttaccctaatcgtcaaccattcaccaataacgattcaaaaacccaaactttgtgtgaagtagttcattccccattactcactcgcttgttttgaattttatttgttgcttcgtttcccactatgaaagaaggtaaatcagttaaactcaaccatcaacaaccgcaccagaacggtcacctctcgccttcaaaa

SEQ ID NO: 11092 - DNA, 274 bp, Glycine max
  Clone ID: 701064034H1
gccctcggcctctaacccttctctgctctctctcttccatcgctcactctgacttcgcctgcgatacccaccaccaccatgcccacaaccttccatctgccgtcaccaaccacaccttccgccaccgttaccccttcctctgtttcacccgcattggaacccttcgctccacctcttctctctttcgcatttttctggttttcccttttcagattcgagagctcaatcgcaacacctccgtaagactgccaaccccgttccgatggtcatcgtt

SEQ ID NO: 11093 - DNA, 259 bp, Glycine max
  Clone ID: 701064035H1
gttgtacaagtacaacaaccaaaaaatgtataggttgctctgaagacttgtacaaagtctcacaaaattaaatatttggaacatcaaaagaactggaaatcgaaacattactcagatcatcaacaataggggagtctctaggaggaaggtgttgtgtgactacaacctcccatagtcccattgatgtatcttggcataaaataaaataaaaataatcagcatgcatgaatgaatattctttattgtcatgttgcattgt

SEQ ID NO: 11094 - DNA, 268 bp, Glycine max
  Clone ID: 701064036H1
tgaattcctcttattcaggaatttggagagtattgatatatcaaggtaggataaaacagtagccaaggaagatatggagttttctatgattttcattgttagcaacattatgctgcttttcagttcagcatttgccaaaactgctagtcctccctctctgagcccaactccagcaccagccccggcaccagacttcgtgaacctcactgagttactcagtgttgctggtccgtttcacaccttccttggataccttgagtccactaaa

SEQ ID NO: 11095 - DNA, 268 bp, Glycine max
  Clone ID: 701064037H1
attctctgaatttttcatctagaggcagagcagtacctggctgcaaaaaccaaagtggttctgatgaggaaagtggatggacatcttacttagaagatttctcaaaaggcatagagccaagttattgttccagtttggatggctcctctttgctctcagatgctgcttcttgtgctgcatggaaattttctcatcagaattttaaggtcagcactgcaccaaatctacccaaaaaactaagcttcaagaaagcaagagccaaacagat

SEQ ID NO: 11096 - DNA, 266 bp, Glycine max
  Clone ID: 701064038H1
ctttgttcactcttcttctcttgcggctagggttttagcgcagttcttctagatttaaggaagatgggtaaggaaaaggttcacatcagtattgtggtcattggccatgtcgactctgggaaatccactaccactggtcacctgatttacaagcttggaggcattgacaagcgtgttattgagaggtttgagaaggaagctgctgagatgaacaagaggtctttcaagtatgcctgggtgctggacaaacttaaggctgagcgtga

SEQ ID NO: 11097 - DNA, 267 bp, Glycine max
  Clone ID: 701064039H1
cctcgagccgaatcggctcgaggtgaaaatggcggtacccttgctctccaagaggatcgtgaacaagcgcgtcaagaagtttatacgcccccagagtgatcgcaagatctccgtcaagccaagctggcgcagacccaagggtattgattctcgtgtcaggagaaagttcaaaggatgcactttgatgcccaacattggttatggctcagacaagaaaacccgccattatctaccaaatggtttcaagaaatttgtcgtgcacaatgt

SEQ ID NO: 11098 - DNA, 262 bp, Glycine max
  Clone ID: 701064040H1
gccaagtgaaagtgagaaaaaataaaaatcaaagagcataatgtcagggatcattcacaagattggggagaccttcatgtgggagggcacaagaaggaggaggagcataagggtgagcaccatgctggagaatacaaaggggagcaccatggtgaacacagtagtgagtacaaaggagagcatcatggtgaacacaaagctggagagtaccatggtgagcacaagccacagcacaaagaggggttcctagacaaagtcaagg

SEQ ID NO: 11099 - DNA, 263 bp, Glycine max
  Clone ID: 701064041H1
attacaatggcggaagaattatcaacagcgattccgcaatcgcaagcaagctccacgaagaaacgcgcttcaaagaatgaaaagctgtgcctcgaggactaccttcatctcgttcactctcgccaaacgcttcatctcaccatgaatcaactccatcaggtcatccgcattcacggtttcaagaaaatccaccacgctcctaagaaagtgctggtgcaagcggtggagtcgctggatctggtggatctgccgcagtcaaaggt

SEQ ID NO: 11100 - DNA, 258 bp, Glycine max
  Clone ID: 701064043H1
gtttgttgtgagctataagctagtttatcgtgaggagaatatgaagttgtttgttttctttgttgctgcagtagttttggtagcatggccatgccatggcgcaggctaccaaaggttccctctccgaatgaaaactggctatggtgagcgttcttcggaggtaaaatgcgcaagttttaggcttgctgtggaagcacacaacatccgagcctttaaaaccattcctgaagagtgcgttgaaccaacaaaggactacat

SEQ ID NO: 11101 - DNA, 254 bp, Glycine max
  Clone ID: 701064044H1
gttgtgatggatcagttctactggatgacacgcacaacttcactggcgagaaaacagccctacctaatctgaattcaataagaggtttggaagtggttgatgagattaaggcagcggttgacaaagcttgcaaccgtcctgctgtatcatgtgcagatatcttagctatagctgctcgtgattctgtggccatattagggggtccacacctatggtacggcgtgttactaggcagaagagacgcgagaacagca

SEQ ID NO: 11102 - DNA, 255 bp, Glycine max
  Clone ID: 701064045H1
cttacaaaaaagaaaaaaaagcaccatcaataatctgtgaacaagacaaaccacacacatagctttaatttgatctaatttcttcatggaggaccaaccattatcatcaaaatcaaagactgctgctttggatcaaacccttcattcaattgggtttgaaattgaagacttgtcaccacaaaaactctctggtcgtctccctgtcacccagaaatgctgccagccattcaaggtgcttcatggaggggtatcagc

SEQ ID NO: 11103 - DNA, 258 bp, Glycine max
  Clone ID: 701064046H1
agtttccacactgcataccttaggtcttccgaattcgaagttaatttgcaagatggctaaggaaaaggctcagatcaacattgtggtggttggtcatgtggaccctgaggaggcaaccaccattaacgagctgaagaagcctgttgtggagaaagaagctccagggcatgccatatgagggcatgcacgtacggcctcggaggggaaccagaaaattatgttaacaaaataatctggaaccctaatgtatcagtgtca

SEQ ID NO: 11104 - DNA, 257 bp, Glycine max
  Clone ID: 701064047H1
tgaatggtgtatagtgcgggagacagtagcaaatagaaccaagccaacaatgggtaccgacaagccaaaccgggtcgggtcgtttatatacatcactgatccgattcgtgttttcctctccggcgcgtcgaaagacgcgactctctccgacgagcttcgacgaacatcctccgatctgctcctccaatcggatgtaccctacgcgcaacttcgcgctgtgtggatggcctctgatccatccaccagacccgacttga

SEQ ID NO: 11105 - DNA, 263 bp, Glycine max
  Clone ID: 701064048H1
aaaattggaacctgcctctgttaaagtttgtatttttctgagtgggtgggttgattgagagtgctgtgcaagcattggaactttttcccaacctgctacttcaatggccactgaagaggttaacaaacctcaatcacttcctccataccctgagatgatagtgaaagcacttgaagcactgaatgagccaaatggatcgaacaagtcagcaatatcaaagtacatagaaaccacctacggtgagttgccagacgcaaccgttt

SEQ ID NO: 11106 - DNA, 271 bp, Glycine max
  Clone ID: 701064049H1
ctataagctagtttatcgtgaggagaatatgaagttgtttgttttctttgttgctgcagtagttttggtagcatggccatgccatggcgcaggctaccaaaggttccctctccgaatgaaaactggctatggtgagcgttcttcggaggtaaaatgcgcaagttttaggcttgctgtggaagcacacaacatccgagcctttaaaaccattcctgaagagaccgttgaaccaacaaaggactacattaatggcgaacaatttagatcagac

SEQ ID NO: 11107 - DNA, 268 bp, Glycine max
  Clone ID: 701064050H1
atcacctccacctccagtttacatatatgcttccccacctccacctatctacaagtaagttcgaattgcggaacaccattcacgataaatcatgttctagtttttatcgaggaataaaggcaagctctatttggagtcaagtgaaacatctatcttcctgtccaagttctttgaataaaagtctgaatgtgtcatctctgcactacaatatttgtgattctgaccaagttggttctatttgtttgatggccatcttgcacgtcctgat

SEQ ID NO: 11108 - DNA, 266 bp, Glycine max
  Clone ID: 701064051H1
gtttctttcttcaacgtttccatcatacacagatcccaatcctctctcaagccctaatttcccctcatttccatggccacagaagctccactgtcgcggtggaacccgctcccgaacctgcctccgccgatcctcccccggaggagaaggaggagaccaaacctgaagccaaggctaagaaaaccaaggagcccaaacctaaaaaggtttccagacctcgcaaccctcccactcatccttcctacgaagagatggttaaagatgca

SEQ ID NO: 11109 - DNA, 266 bp, Glycine max
  Clone ID: 701064054H1
gagaaactgagagaaattcgcaaaccctaatttcggaaagatcggcgatggctgcctccaaggatcgcgagaacttcgtctacatcgccaagctcgccgaacaggccgagcgatacgaagagatggtggaatcaatgaaagaagtttgcggatcccgacgttgaactgactgtggaggagcggaatttactttctgttgggtacaagaatgtgattggtgctcggagagcatcgtggaggatcctgtcttccattgagcaaaagga

SEQ ID NO: 11110 - DNA, 257 bp, Glycine max
  Clone ID: 701064055H1
cattctcccatttcctctcagaaccctcgatcactcccacgcgctcctatatcctctccttcaccgtcgctctctccaacgatcacaacaacatcgtcatcccatggcaaacgccgcatctggtatggcagtccatgatgactgcaagttaaggttttcggaggtgaagacaaagaggacacaccgtttcatagtttttaagattgaggagcagcagaagcaggtcattgtggagaagcttggtgagccagcccaag

SEQ ID NO: 11111 - DNA, 243 bp, Glycine max
  Clone ID: 701064056H1
atcgagggagtgagggactagcacagaaagatattgtttggtgtacggtggtgagtgtcgacgctgccactctcgcctgtgtctgtgatcagaaatggaatctgatgcaccgacatggggagacaaactcatgttgaggggattgtcatccatggttttcatggagcaaagtctgaagaaagggacatgggccagaagttcttcatagatatagatgcttggatggatctcaaagcagctggc

SEQ ID NO: 11112 - DNA, 259 bp, Glycine max
  Clone ID: 701064057H1
cttaaatggacttgtcgatccaaggttgcagacaaattacaatcttcacgagatgatccgaatgactacttgtgctgcaacttgtgtgcgctattcagccaggctccggcctcgaatgagccaggtttgcttgagaattactgaatctgaagatttgtgtgagaataaaccttgtgtttcattttatatttgaattgctttggctgtttgtctctgacaagggtatgcagtaaaatgcctccctgaaagacatttgcct

SEQ ID NO: 11113 - DNA, 219 bp, Glycine max
  Clone ID: 701064058H1
ctcttttgtaataattcgtcaagttagaccttgatattatgaggctacaaaccatgtttttttttccttaattcgcaaaggcttgcttgcttttaagtactctagacctatcaaacctctccatgtttgcctgtcttcattcaaatttctgttatgctgtcaacttgttaccaccgtggttcaattaataatatttgtgcaaaaacatgttagtattag

SEQ ID NO: 11114 - DNA, 253 bp, Glycine max
  unsure at all n locations
  Clone ID: 701064059H1
gacggttcaaaaggaagatttgggcttgagtctaagtttgagcttccctctcctctcctcttctccttccagccacaaccctcagaaaccctcttggaacgaccctattttcacttcttcaggtgaagctggatcattcctccgcggaatcgatgtgaaccgtttaccttctgtggttgattgcgaagaggaagcaggtgtttcatctccaaacagcacggtttctagcgtcagtggaaagcgcacangaggg

SEQ ID NO: 11115 - DNA, 255 bp, Glycine max
  Clone ID: 701064060H1
atgcccctgctgctcttgcttttgcttcatgaagccaaagcaagggaaggcaaaggtcaaggaagtcaaagaaaccaaggtggaagaaaaaaaggttgaagagaagattgaagaaaagaactattgaccatgtaactccatttcaagctctctttggttattattagtatttttctttttgcttttttcttctcaccgatattatataagcatgcacaacaaatttgtgcttctttgttcctataattaccactg

SEQ ID NO: 11116 - DNA, 255 bp, Glycine max
  Clone ID: 701064061H1
gttagcgttaccctcggaactgaactgaactgaactgaaccggatccagagagtgctcctaaacgacgccgtttcgcaagcatcagtagtgtagtcgcagagaatcaaatcaatggagaagggaaagggagtgatgggatcgggaggacgaagatggggcgttgacttctccgacaattccacttctcgcgatattcccggtcctcccggtttctgttgcacttctctcgatcaggacgattcaacgctcagtcg

SEQ ID NO: 11117 - DNA, 255 bp, Glycine max
  Clone ID: 701064062H1
cgcaacaccaaagattcacttgcttgtttcgtctttcttgttgtgtggtaccttcctgagcttgttccactgcacattgtcccttctgaaccctgaggatggggttggcattctggtgcaagctgatgatgatgttagcatggcccaaagcaacagagattctaggaagagatgtgacatttctgttggaaaatgggtttatgatgactcttaccctctctatgactctagttgtccatatctcagctctgcagt

SEQ ID NO: 11118 - DNA, 258 bp, Glycine max
  Clone ID: 701064063H1
gagtgagagagtgagtgagatagagagagacgcttcgcaaatctcaatcgaatctcagaaaaatgagagacatcatcagcattcacataggtcaggccgggatccaggtcggaaactcctgctgggaactctactgcctcgaacatggcatccagcccgacggcatgatgccttctgactccaccttcggtgtagcccacgacgccttcaacaccttcttcagcgaaaccggatctggcaagcactcccccgtgctgt

SEQ ID NO: 11119 - DNA, 259 bp, Glycine max
  Clone ID: 701064064H1
gaaaattaatctccctttcattttctctgcatctgtactctccaaaatgccgtccttagaggaggagctcttcccttcaaccccacgcaagttcaagatcgagcgggcccaccacatgaaccgccagctctaccgctgcttcgcctccaccagcaccatgttcctgtgggccctctttttaatcgccctcaccgcttcatatctcagcttccaaggcttcgttgattccggcagccgctacctctccgcctcctggggc

SEQ ID NO: 11120 - DNA, 269 bp, Glycine max
  Clone ID: 701064065H1
aagaaatttaagtgaggagctagagaatgatgatgaagtctgctatgtgtgcagtggtggttgtagcacttcttcttctggcggaggtggggcccatggctgaggctgtgacatgcaccccaacagagttgagtccgtgtcttccagcaatcacttccggtgctaaaccttccaatgcttgttgcacgaagctgaagcagcaaaaaccatgcttatgtggctacctcaaaaacgctagcttgaagcagtatgttaactctcctaatgcc

SEQ ID NO: 11121 - DNA, 267 bp, Glycine max
  Clone ID: 701064066H1
gtttggcatggcactctgctggaacttacgacgtgagctcgaagaccggtggtcccttcggaaacataaagcacgcctccggaatgcgctcacggcgctaacaacggtcttgacatcgctgttaggcttttggagccactcaaagcggagtttcctattttgagctacgccgatttctaccagttggcttccgttgttgccgttgaggtcaccggtggacctgaagttcccttccatcctggaagagaggacaaacctgagccacca

SEQ ID NO: 11122 - DNA, 262 bp, Glycine max
  Clone ID: 701064068H1
gcttgctactgagtttccacactgcataccttaggtcttccgaattcgaagttaatttgccagatggctaaggaaaaggctcagatcaacattgtggtggttggtcatgtggaccctgaggaggcaaccaccattaacgagctgaagaagcctgttgtggagaaagaagctccagggcatgccatatgagggcatgcacgtacggcctcggaggggaaccagaaaattatgttaacaaaataatctggaaccctaatgtatc

SEQ ID NO: 11123 - DNA, 260 bp, Glycine max
  Clone ID: 701064069H1
cggctcgagtaggttttggttgcagagacatgggagaaaggattccgtgtgggagtggcatgtatttccccttccctcctccgccatctcccattcgcccttcttcttcttcttcagatcgcgataggtatttggccgaactactcgctgagaggcaaaagttggtaccctttctccaagttcttccacaatctaccaaactcctaacccaagaaatcagacgcatgtccgttggtggcggcggcggcggcggcggcttt

SEQ ID NO: 11124 - DNA, 243 bp, Glycine max
  Clone ID: 701064070H1
cgcggtggcagacaccgtggttatggtggtggtggtgaccgtggttactctcgtggtggtgacggtggtgatggaggctggagaaactagggcttgatgtcgttgattagggtttatgattatgctccagtaattttagttgtgtttgagtttgagtaaccttatggttttgtgtcaccgtggttcctgtttttgaccaatatatctggttggttatagtcggattaatgaaatgataatcag

SEQ ID NO: 11125 - DNA, 262 bp, Glycine max
  Clone ID: 701064071H1
gttcttatgtatggagtaagaagtattcattcaaggcatccccatatcctggacagaactctttgcaacgtgttatcatatttggtcacatgggaaaggctgagcgtgatggttcaaatgaatatgctgattatcaaccgggttctctaaacaccacagaccaactcgtcaaggatttagaaaattatgacattgttttccacataggagacatgccttatgcaaatggatacatctcacaatgggaccaattcacagctcc

SEQ ID NO: 11126 - DNA, 260 bp, Glycine max
  Clone ID: 701064072H1
cgggtgcagaagcaaatggcggcgagaagcaattgaaatttctgatctacggtcgcagcggttggattggtggtctactgggtaagctctgcgaagagcgcgggatccaatatgagtacggcaccggcagattggagaaccgctcgtcgttggaggcggacatagcggctgtgaagcccagccacgtgttcaacgccgcgggtgtcacgggtagacccaatgtggactggtgcgaatctcacaaagttgaaaccatccga

SEQ ID NO: 11127 - DNA, 251 bp, Glycine max
  Clone ID: 701064073H1
tagagccctttggacacaccctctaaaccaatctatcaagtcctgaatctggtgagcaaatatggagtttgttggcaaacatccatccatggttcttgaagaagcatggagataaaggcgtgtgagacggtcctcaccactcacactcctccacttaaaacagtttgttttggcttagctttggcttctctaatcaacaagggatgtgttctaacattctctcttgagtggcagaagcagatatgcattct

SEQ ID NO: 11128 - DNA, 254 bp, Glycine max
  Clone ID: 701064075H1
attctaaagaaatataactaatattctttagaataatcaaaaagaatattaaattcaaataaattttagatagaaaaaagacttaaaaaggaggatttgaaatgcgagatctaaaaacatatctttccgtggcaacagtagtaagtactctatggttcggggctttggcgggtctcttgatagagatcaatcgtttttttccagatgcattgatattcccttttttttcattctagttattgacacggaaaggg

SEQ ID NO: 11129 - DNA, 253 bp, Glycine max
  Clone ID: 701064076H1
cgattctcttcctctttctctgttctgaaaccactcccgcctcgtcgtcaccatgccgcaaggggattacatagagcgtcacagaagagactatggctaccgtctcgatcacttcgagcggaagcgcaagacagaggcgcgtcaagttcacaaacgctctgcaattgcccagaaggctctgggtattaagggcaaaatgattgccaagaaaaattatgctgaaaaggcacagatgaagaagactttggctatg

SEQ ID NO: 11130 - DNA, 251 bp, Glycine max
  Clone ID: 701064077H1
acctatcttggtagacatttgaagtttaaaccttcaaattaatcaaaccattttaatttgcctatagattctgagtcactgctgctatggcgctacgcgtacttcttgtgttggggacgttgctgatgttgtgccttgttaaggtttcatctgatccaaagatagaagaagaaatactggaagcagaagaagaactgcagtttcccgataacgagccacttatcgtgagacacgcgaacagaaggctaatg

SEQ ID NO: 11131 - DNA, 251 bp, Glycine max
  Clone ID: 701064078H1
caaatatggcatactctcaacttcaaaaggtggaactaatgtgcacatcaaggcttctgctgatcagttccataatgttttatgcaacaggacacaccatattgccaacattttccctggaaaagtacagtctgttgaaattcataaaggtgaatggggcactgagggatccgtcatctcctggaattatttacatgagggcaaagtttgtgtggctaaggagatggttgaaggcatagacatgaaaaaca

SEQ ID NO: 11132 - DNA, 254 bp, Glycine max
  Clone ID: 701064079H1
cggcgagggatatctatcttcattttcgtcgtcgttcatttttttattttttttttctgttttccattcgcttcttctctcagaaaagctcgccaatcgatcttgctctcttctacgcttttcgaattccttccattccattatggacgcagattagattcacgttcacattcacttctcttcgtttgcttcaaccactctgctctgctctgctctactctgagatccgatcgcattttcattcagaaaggaaa

SEQ ID NO: 11133 - DNA, 258 bp, Glycine max
  Clone ID: 701064080H1
ctgatattcttgtccgcaaccctcgccggttttttcgttctcagaaacctcagatctcagcctcaaattgaagaaggcgacgctgttgttcctcccaaccctaaaatctcagactcctccgacgcttcctcaaatgtaacttccaagcttcgcgctgtggtagagtctgggttctggaccttcgtggatatggctagtggccgttatctttggaggcatttggtctgtaattcttccaagagatcgtgatgatgcgat

SEQ ID NO: 11134 - DNA, 262 bp, Glycine max
  Clone ID: 701064081H1
cactcgagccgaatcggctcgatgaagaaatcaaggaatagcaatgcacttgttaatgagaatgcacccttgttgccaaaaagtcatgttcaggagagtgatgctgggtttgatgatttcaatggagcttcattttctggggctgtttttaacttgtccaccacaattattggtgctggcatcatggccttgcctgcaaccttgaaacagttggggatgatacctggtcttcttgccatcatcatcatggctttgttgacag

SEQ ID NO: 11135 - DNA, 262 bp, Glycine max
  Clone ID: 701064082H1
ctagtgtgataaatcaagagagagagagagaatatggtttccagggttcacaagagaacagccatgtacaggaacctacacctgcttcgttcaatcagatactcacactcggtgtcagattacatacaaggtttaaagcaaaaactggaagaattgaaccagttaacagtggcaacggcacgaaaaatcgttgactatgatccaatgcctaagcttgaagttgaaacacaagaagagggttttgtgatcaaggtgctgagtg

SEQ ID NO: 11136 - DNA, 262 bp, Glycine max
  Clone ID: 701064083H1
caatttgtgtggcaaagaatttagatagtctagctctcaaatcctcttcttctcttccatccatcctctcagactgatcttagacgcaaacacatcctaatcacaaaagcggtgaccatggcaaacatgattatggcttccacaaaacctctggttccagtctgcaccagttcccgttcccccacaccaaaactccccattctccaaatttcaaagccccagatgctgtccctcctgggagggatagcaccactggtcttgg

SEQ ID NO: 11137 - DNA, 235 bp, Glycine max
  Clone ID: 701064084H1
ccacgccgtcgtcaagatcgtcgccgccgacctcgagtggtggttccatggtccgccctcacaccagtttttgatgcgcatgctcaccggcgactccgctgccgacaactccttccgcttccttccgcagtccatcgccgccttcggctccaccgtcatcgtcgagggttgcgacaccgcccgcaacattgcctgggtccacgcctgcaccgtcacggatgggataattactcag

SEQ ID NO: 11138 - DNA, 251 bp, Glycine max
  Clone ID: 701064085H1
agtgaatatgctgatgtggccaaaggttgggcttcagttcagagtattcctagaactgtggagcttgataggaagactggcagcaacttacttcagtggcctgttgctgacatcgagagtttgagattgagaagtgatgaatttaaaaatttgaaggctaaaccagggtcagtggtgtccgtagatattgacacagccacgcagttggacattgttgccgagtttgagatagacagggaaccttgacaaaa

SEQ ID NO: 11139 - DNA, 258 bp, Glycine max
  Clone ID: 701064086H1
cagcagtcgttacagagactccataacccgaaaatgcctttcaagaggtacgttgagattggaagggttgctcagatcaactatggcaaagagtatgggaggctcgtggttattgtcgatgtcattgaccagaatagggctcttgttgatgctcctgacatggtgaggtccaagtgaacttcaagaggctatcactcactgacatcaagatcgatattaagaggatccccaagaagaaggatctcattcaagccatgg

SEQ ID NO: 11140 - DNA, 258 bp, Glycine max
  Clone ID: 701064088H1
gagacagggagacaagacagagcagtacaggttactaccaatggctaccaaggtttatattgtttattattctacatatggacatgttgagaagctagctagagagatagaaaaaggggctgcttcggtggatggagtagaagcaaaactgtggcaggtacctgaaaccttgcctgaagaggtccttgcaaagttgggagcacctccaaagagtgatgctccaattattactcccaatgagcttcctgaggctgatgg

SEQ ID NO: 11141 - DNA, 252 bp, Glycine max
  Clone ID: 701064089H1
gtgtgcagaagagcgtcgcagtcgcaaccctaatcagaagaagcgcagttcaagcgagtgacagccaccagccatgggtcgtatgcacagccgcggtaagggtatatcctcttctgctttgccctacaaaaggacacctcctagctggctcaagatctcttcgcaagatgtcgaagaaaatatctgcacgtttgcgaagaaaggtttgaccccgtctcagattggtgtcattctcagagttctcacggtatt

SEQ ID NO: 11142 - DNA, 252 bp, Glycine max
  Clone ID: 701064090H1
gttctgctcttcaatttattcatctctgacaccctcttaattctgcttccagttcctctgagtgatgggtatgatctctcctcactcccacaattcccacattatagtaatcctcatcacctgcttctttcgtcataaattctagatcaaactccactccctgatcctcccttttacttcttatgtagcatgtatgaactcaaatcatcaaatgaatatgaccctttaatctaagaagaagaaaaaaacaca

SEQ ID NO: 11143 - DNA, 250 bp, Glycine max
  Clone ID: 701064091H1
ctcaaactcaacttcaattgctaatttttataaagctagccggagatgatggttcaaaaggaagatttgggtttgagtttaagtctcaatttccctcatcacagtaccccaaatcctcaacatctgagtctcatgtcatcctctactcattcctcttccccttctggtttcaaccctcaaaaaccctcttggaacgaggctttcgcttcttcggatccagatcgaaactccgacacatgcagacgcgaaa

SEQ ID NO: 11144 - DNA, 248 bp, Glycine max
  Clone ID: 701064093H1
ctaagtttccgcgttttgtctttcataaaaaaaatgttaaattattattttctatgataggattggtttcttgtcttttttctcttgtttaagaatttcggtgtattttaacagttgtaaagcactctgcgctctctctgcatgatcatgtacaactacaagcatgctctctgtagttttcaacctgctgcgcttgcaggggttgtaaaactaatcaatataattaaataaattacattctgtctctc

SEQ ID NO: 11145 - DNA, 249 bp, Glycine max
  Clone ID: 701064094H1
cagaaaacccccaaccccaacctcaaccttaacctctcctcactttcttttcaaccagaactatgattaagctttttaaagtaaaggaaaaacagagagaactggcagaaaatgcgagtggcggaccacccgttaagaagcaaagtgccggcgagttgcgtcttcacaaagatataagcgagctgaatctaccaaaatcatgtaccatgcaattccccaatggcaaagatgacctgatgaactttgaag

SEQ ID NO: 11146 - DNA, 254 bp, Glycine max
  Clone ID: 701064095H1
gggtatgagtctccactaccctggcctgaaagcaaattgaagatattgtacaagaatgttgcacacccgaaactagctgcatacgtaaaaaggcataattggttgatggagtctggagagtatcttacttttccccaaaaccaatctgagttcaagggagggattcttcactatcttgagtccattgaagagatggtaccagacattgaatggggtaaaaatattcgtgttgtcctggacattggatgtacaga

SEQ ID NO: 11147 - DNA, 274 bp, Glycine max
  Clone ID: 701064101H1
cctgttgctgcctcaggtggtggtggtgctgctgctgccgccccagctgctgaggagaaaaagaaggaggaacctgaagaagagagtgatgatgatatgggatttggcttgttcgattagggacattctcaatatgatttggttaaattttgtggttctttacctttaagtttactttatggatattgtaggttttatttttgtgctggttatttatatctgtataagacttgattttgtagttttatgaacttcggaatgtgggtttatgtcc

SEQ ID NO: 11148 - DNA, 277 bp, Glycine max
  Clone ID: 701064102H1
ctttaatcaacacaaaaaaattatcatctgcagtttcagggaaatacaacaaattgggattttgttttcatttgacatattgttctttggcgtgatctcctgtctcatacttctgttcacattggctttgccactttttaaacccttcctggttttatgatgctttagttgtgctacaatataaaggtgtgatgtttatagctttggggtcatattatgggagctctctactatgcagcaaccatggggaggaatgaatccgatgcaagttgttggt

SEQ ID NO: 11149 - DNA, 266 bp, Glycine max
  Clone ID: 701064103H1
tgaacaaatggccgaaaagttagtgctggtatcagacatggcttccactatgcagcaggttccctctaatttcatcatgccactcggtgatcgtccaaatcttcaaggcgtcgaccagtcctcagatggttgcattcctctcgagccatcacgacgaccatcatggatccacatcgctcccagatcatccaacagattgaccacgcttgccaaaattatggatattttcaggtgacaaatcatggagtaccacagggtgtgaatga

SEQ ID NO: 11150 - DNA, 278 bp, Glycine max
  unsure at all n locations
  Clone ID: 701064104H1
catgacttgaaccaaatcatggcatgtgtaattcatgtttcttgatgataaaaggaggaaaaagcagttcttgtttttctttctttttctatctattcccttttttttcttcttcttttaatttatttgtaaagtgtgctactactgnttgtaatttggctgagaattccaagaggatgngctggtgggcaaaaacaaaaaactctaaactcaaaaaaaaaaaaaacgggggggccccaattttgggctttcttccccggggaattttttcggggggg

SEQ ID NO: 11151 - DNA, 272 bp, Glycine max
  Clone ID: 701064105H1
ctttattcttagctttcctttccagttcatacttcatcctattattactttccctctttgcattccaaatggccactgttgaggttgcacagcaaacaccaacaactgtgacagagaatgaaacaacgactgaggtaaccaagattgaggaaactaccccagaacagccagccaccgaggttactgccccagaaacagtcaacgaagaagcaaaagaggagcagcagttgagactaatgaggcaacagaagttacagaggaagggaaggctg

SEQ ID NO: 11152 - DNA, 271 bp, Glycine max
  Clone ID: 701064106H1
catcattgtctttgttctcggtgagggttttagggcacacaccgcagctttaagctcagggaaacgttttatttcacactctgcgattcgcgatggccgacgatgactatgaggatatcgacatggggtacgaggatgagccaccagagcccgagattgaggaaggtgcagaggaagatttggagaacaaaaacgatgagttaactggagagccttctgacactgaggataaggaagaggaacaaccagtggagcggcctcgaaagacatc

SEQ ID NO: 11153 - DNA, 271 bp, Glycine max
  Clone ID: 701064107H1
attaatttgcatataaattggcaggatatgggaagcaagtaattgagcagagtagccatggccagaatcgcacttggaagcacccgagaggccactcagccagactgcattcaggccctcatcgttgaattcatagccaccttcctctttgtctttgttggcgttgcttcttccatggtcgttgacaagcttggtggggatgcactagtgggattgtttgctgtggccgtggcacatgcacttgtggtggctgtaatgatctccgccgccc

SEQ ID NO: 11154 - DNA, 226 bp, Glycine max
  unsure at all n locations
  Clone ID: 701064108H1
ctgctccagtgctacttcctcttccatcacataaaaccctagtaaatccaattggggattttttctttctagaagaggattgaaagggataaaaaggtcatatcagactgaagaatatccgagtgactgaaatgggctctggtggacttggccatctggacctacgagnacttgactcgagtcgatgtcttcactttacacaggggctgtgcttgagaggtgtagg

SEQ ID NO: 11155 - DNA, 248 bp, Glycine max
  Clone ID: 701064109H1
cttggtcattgacggtggctcaaaagctctgcttctggtcaaacgggacatagtggatctcactcatatgaagagactttcaactttggtggacgggtttttggttcttgcattgttcagttgtagcacatggacagtgtggagcagctcatgctgcaatcagataaactcgtacgaagtccggcctcacagtgtcagtattactgaatttggagctgttggcgatgggatcactctcaacacaatag

SEQ ID NO: 11156 - DNA, 263 bp, Glycine max
  Clone ID: 701064113H1
gcgactgcgcttcagcacaatgggtgcctacaagtatgtttcggagctatggcgcaagaaggcgtctgatgttatgagattcttgcagcgggtgaggtgctgggagtatcgccagcaaccttctattgtccgtttgacaaggtctactcgcccagataaggctcgtcgcttgggtttcaaggctaagcagggttacgtgatttaccgtgttcgcgtacgaaggggtggccgtaagagaccagttccaaagggtattgtttatg

SEQ ID NO: 11157 - DNA, 265 bp, Glycine max
  Clone ID: 701064114H1
cacaaatcaaagccatggccacctccaacttctctattgttctctccgtctccctagccttctttttggtgctacttaccaaggcacactcgaccgataccgtttctttcaccttcaacaagttcaacccagtccaaccaaacattatgctccaaaaagatgctagtatttcatcctctggggtgttacaactcaccaaagttggcagcaacggcgtccccacctcgggatctctcggtcgtgccctttacgctgccccaatcca

SEQ ID NO: 11158 - DNA, 268 bp, Glycine max
  Clone ID: 701064115H1
caggttcagcccctgacgacgccgtttctcctcgggcagctccggtgggcccgaacgcggccgaagtcaccgccggtggcgctgaagagggcggatgagcggtcggagtggtgggcggtggacggcgaagtgcacgagatcggacatctcgtgccgctacgtgagcgcttcgtgattccccgagagaacatccccaacaagcgccgcaagcagctcagagaacagttcatgcgccgaacgcgcctcgttcttaaggaatccgagcatg

SEQ ID NO: 11159 - DNA, 271 bp, Glycine max
  Clone ID: 701064116H1
actctgtatcatttcatttcgataatcatccatagttactgaagataatggcaaccatctccgctgctatcacaaccccatcgatcacccgcgcatgtctagtgcaaaaacgttctcttgggttctcatctcccgttcttggtttgccagcaatgggtaaggtgggaagagtgagttgctccatggaggaaaagccttcttctgtgaaggaaagcagctcaagcatgttggggatgggggcatctttgatggcagcggccagcgccgcagc

SEQ ID NO: 11160 - DNA, 274 bp, Glycine max
  Clone ID: 701064117H1
ctcttccgtattgttaacttagattatttctgggagatgcattattgtcctttccgaaaggcaattattatgccactgcggacttctgtgtccaccatcaggacttgaaaggagaagttttgtctatgttccggacatgcaaatttgaagagccaaatgagggcggagaagtgagctgctgctctggtttaacattgagcggtaattttgaatgtataaagtcttaggcagctagattttgcggaactttcatgatcttccatccttggaggca

SEQ ID NO: 11161 - DNA, 276 bp, Glycine max
  Clone ID: 701064118H1
tgcacgatttctgcttcacgatcccctacggattgatgttagtgggtggtggactgttcgcctacataagcaaagggagcatcgcttctctcgccggacgacccggctccggtttgcttctcatcgtcgccggctatctcagtctcaatgctttcggcaaacgaaaaaactcttacctcgctctctttctcgagaccgtttgtgcagccatactaaattgggtcatggggcagcgatatttggcaaactccaagattatcgctgctggtcttgttg

SEQ ID NO: 11162 - DNA, 266 bp, Glycine max
  Clone ID: 701064119H1
gtacactgcacagatctgagtggtgactctttcacttctcatcactattattattaggtctgaaggctcattgccattatcatgtcaaggaggccagtaaatccttcgcgtcggctaggtgatggtggaagtataccatttgttgcatctatccagtccaaatctcaaaactctcccctactatctattgggcttgtcattgtgggtgcaatcctcctgattggttattgttacagcattcaggtggagctagcggtggtattaag

SEQ ID NO: 11163 - DNA, 271 bp, Glycine max
  Clone ID: 701064120H1
ctgatatagtgaatagaaatggctaaaaacgagttgaggcttttgggtgcttggttcagtccatatgccctgagggtgcagattgcccttaacctcaagggtctagattatgaggttgttgaagagaccttgaatcccaaaagtgatctgcttcttaagtccaaccctgtgcacaagaaaatcccagttctactccatggagataaagtcatatgtgaatctgcaatcatagtagagtacatagatcaggtttggtccaaaatgctctctc

SEQ ID NO: 11164 - DNA, 266 bp, Glycine max
  Clone ID: 701064121H1
ctcacaaatacacacagaaagttgagaggtggtagtacctgctgcggaagcgttcagcagccaatagctttcgcagcagcatcaacaacaaaccaacgattcaaattcaacctcctcattcagatggcacaatctttctcaccagccaaacgcgcccttgccttttcccttcaccggcgagggtacgcagtggcgtctgatgcttctccttcggtgagagggggatggatagcatggaagcagagtgcatcgagaaggtgtgaaaa

SEQ ID NO: 11165 - DNA, 262 bp, Glycine max
  Clone ID: 701064123H1
gaggctgtgttgcgtgttgaagagggaagaagatgtcgggtatgggagacgggtacgtgggcaccgcccaagacgcggtgaggattcgacggttggagaagcagagagaagcggagcgtcgcaaaatccaagagctcaaaaccaagtcgacctccgccaagggccaacccggtctcctccaattcggttccagcacttccgagatttctgagactgcctttaagaaggaaactgtgggtttggtcactagagagcagtatgt

SEQ ID NO: 11166 - DNA, 266 bp, Glycine max
  Clone ID: 701064124H1
cttgcaaactgcgatttctctgcagtttcttctaccctccaactctcacctttctttacgcgattttggctttcatcaacttcttattgaaatccttcctcagtcttctcccattttccagagttcttaaaaattgatgcttccttacaagtctttctgcgcattccgtttccttcctccagggaaaagttagcgtgtctttaggtcacaggattttgagagatttactttttaatctgcctctgaatcaattctgccagaagata

SEQ ID NO: 11167 - DNA, 212 bp, Glycine max
  Clone ID: 701064125H1
ctagcctccatgtattcctcaagcaggtttagacgctacagctaagcaagctgctgagaaggcaaagagtaacactggacaggatctggtggatgagaatagagctgcgtgtgtatactccgtgaattctggaggacttacatgatagtcgatgtcgaatggggatacgatgtactatccgatctcgtccatggacacaacgtatattggta

SEQ ID NO: 11168 - DNA, 145 bp, Glycine max
  Clone ID: 701064127H1
cgaggagagagagatagtcctgaaacttgggtgcgattccttcactcagaataacaacacatcactatggttcttctgagtcgagcctcttcacgcttctctcagatggtttcgcctcaaagggtagtttcactcgacataatat

SEQ ID NO: 11169 - DNA, 255 bp, Glycine max
  Clone ID: 701064128H1
ctagaatatgctctcacacattatggctccatgaagcacacgtccggatacgattcaatagaaagtctgaccctactggtagtggtagcacacgttctgtagctggtctaacttcgtaggtcgccgaaagatacctacaggagcattactccaaggaaggacatgcttcttcatgtttccttgtggtggatgcccgtacacggatttgtcgtgggtatgcttctgtaacaatggtctctgctgaagatgcggacg

SEQ ID NO: 11170 - DNA, 259 bp, Glycine max
  Clone ID: 701064129H1
ttttaagcttgctactgagtttcacactgcataccttaggtcttccgaattcgaagttaatttgcaagatggctaaggaaaaggctcagatcaacattgtggtggttggtcatgtggaccctgaggaggcaaccaccattaacgagctgaagaagcctgttgtggagaaagaagctccagggcatgccatatgagggcatgcacgtacggcctcggaggggaaccagaaaattatgttaacaaaataatctggaaccct

SEQ ID NO: 11171 - DNA, 265 bp, Glycine max
  Clone ID: 701064130H1
gtagccaccactcagagccatcgagtgatgatcgcttcgccgcagtaatcgccggaaacgaattcgccgtttccctgccgagatctctcaatctcacacgactcagatacctctatcaattttcctccggttaggttgttagggtataaatagtacgtagtttttccttatttatggcttcggagaatgtgaagaccggggattccgccgtcaccaccatcgtcaatctcgccgaggaggccaagctcgccagagaaggcgtcgt

SEQ ID NO: 11172 - DNA, 272 bp, Glycine max
  Clone ID: 701064131H1
tctttcccagaaaattaatccaacattttctaggtagccaaacactcccaccatgaacaaatccgccctagtcgccgcctccgtcgccgccgcgtcggccaccgccacttccttttcctcctccgcaaagctctctcttcaggatggtggggctcagagaagccacggcggatcctcgccggttgcgaactcggcgtcgacggagaagttcgcgccacggttcgacgggttgcggttcattgaaacgctgattactgcgcacagatgaacgc

SEQ ID NO: 11173 - DNA, 269 bp, Glycine max
  Clone ID: 701064132H1
cggaaaattgtggtttgtggaaaagctgagaagaaacgtggtaagaaaaatggaaatattagcgatgaatctgacgatgaaggattcatgtccaagtccaagaagtctaagaccaaaaagaccgagtcaaaattgtctcgcttcactaaggataattgctgaagaatgaagtcagagtgcattgaggattttcctacagctttttttttgaaggttcccgggtccaactgctaaacctgtatggtggccaaactcctcccctccttgtt

SEQ ID NO: 11174 - DNA, 275 bp, Glycine max
  Clone ID: 701064133H1
gtttgttgatccatctcttgtttcttgctttctttcttcaccatgtcacttgctgggaaaatcaccactgaaatcggggttcatgcaaccgctacaaagtggttcaacctcttcgcaacacaactccatcatgttcaaaacctaactgatagagtgcatggaaccaagctgcatcaaggtgaagactggcatcacaacgagacagtcaagcactggacttataccatagatggtaaggttacaacatgtctggagagtattgaatccattgatga

SEQ ID NO: 11175 - DNA, 164 bp, Glycine max
  Clone ID: 701064134H1
cttccgggttcacgtttcaccatcactttttgcgcttctctcactcactcactcttcttcttcctcttcgtgtggttttctttctcgaactcgaacgaagatgcgtgagattcttcacatccagggagggcaatgcgggaaccagatcggagccaagttctggg

SEQ ID NO: 11176 - DNA, 273 bp, Glycine max
  Clone ID: 701064135H1
gtagcaaccacagaggaagagaacaaaccagctgagacagtggaagccccagtagaggttcctgttgagaaaactgaagcttagacttatggacagtgtgagtgagaaaaacaagtttaaaaatggtcctagttgtggggatcattaggtctaccattttgcatgtcatgttgaaaagcttttttttttatttatttctttagtttactttattattaatatattattattatatgatggttaagtctttggtcgtattatggagggtatacc

SEQ ID NO: 11177 - DNA, 207 bp, Glycine max
  Clone ID: 701064138H1
agagtttgttgtgagctataagctagtttatcgtgaggagaatatgaagttgtttgttctctttgttgctgcagtagtttcggtagcatagccatgccatggcgcaggctaccaaaggttccctctccgaatgaaaactggctatggtgagcgttcttcggaggtaaaatgcgccagtcttagggctgctgtggaagcacacaacat

SEQ ID NO: 11178 - DNA, 244 bp, Glycine max
  Clone ID: 701064139H1
ctataattagggtcacgagggtttcatcctgcggcatcagacatgggaggaggcaatgggcaaaaggcaaagatggctcgcgagaagaacatcgagaagcagaaggccgcctcaaagggaagccagctggattcaaacaagaaagcaatgtcgatccagtgcaaggtgtgcatgcaaacatttatgtgcaccacatcggaagtgaagtgtagggagcatgctgaagccaaacaccctaaatctg

SEQ ID NO: 11179 - DNA, 256 bp, Glycine max
  Clone ID: 701064140H1
cgaataactggagggatgaatcaccatatcaattgctggattcaactctgctagaatcttatgttccaaacgaagtgtaaaagtgtatgcagattggtttattgtgtgtgcaagaaaatccagatgacaggccaacaatgggaacaattgtttcatatcttagcaatccttcatttgaaatgccattccctctagaaccagcattttttatgcatggcagaatgagaagacattcagctgaacatgaatcatcttc

SEQ ID NO: 11180 - DNA, 97 bp, Glycine max
  Clone ID: 701064141H1
ctcgacctcgactcacatccttgtccgattccgcgaacgagtcgagttaatcggtgtggtaagatctatgctgtgtcttcgtcctgtgaaccggacg

SEQ ID NO: 11181 - DNA, 85 bp, Glycine max
  Clone ID: 701064142H1
cctcacttaacttcaaaacggttccaatggatcgggtttcatgtagtatcattctccccgaagcgtatcaaggtgtcaaagatga

SEQ ID NO: 11182 - DNA, 249 bp, Glycine max
  Clone ID: 701064143H1
ataagcagctgcattggcttaccaatgcctcagccacaggccaaggagtagacccttaatgagcactgtggttaatgttcttgagccacttcaggactttactgatgttccaattggaccctttgtttacactgttccagctgaacaacacaacgaagtggcaaaagagagtgaaacacctaaggagaggaagagggaaaatgatcatcatcatcataatcggcatcatcatcatcatcgacacaatgg

SEQ ID NO: 11183 - DNA, 240 bp, Glycine max
  Clone ID: 701064144H1
tctgtttttaccactttctgggtctttacttcttcaggtcaaggtcaccaattcatggaaagtctgaacctacaaatcctggtgacacactttatgtaactggtctatcttcgagggtcaccgaaagagacctagaggagcatttctccaaggaacgcaaggtttcttcatgttatcttgtggtggagccccgtacacggatttctcgtggttttgcttttggtagcatggaatctgctg

SEQ ID NO: 11184 - DNA, 257 bp, Glycine max
  Clone ID: 701064145H1
catatgactcgtggatgtgtcatctcctttattcaacgttgaatattggcattattctcggccggtattgataaaatactttttcgctgtagctctgaataacagtccatcatagacagatggggtctgaaggtcctccaccagatgtgccgacagtgcatgtcgcaggggtgcacgaaattccatggggtttctgagtctacagtggtcacaattgccgatgatgtcaatggatattagatccagaaggaaggttt

SEQ ID NO: 11185 - DNA, 259 bp, Glycine max
  Clone ID: 701064146H1
ctaacaaaagatataaacaaaatggcattgcaggcaccacctagccttcacaccgtcaatggcaatgctggcctgagacgactcttgatgaatccttcttctttttctctaaagtcatctttcttctctggttccctcaatttctatcttcatcccaatcacctccatcttacttcagctccacccaggatttccatgcgtgttgcttccaaacaggcctatatctgtcgagattgcgggtatatttacaaagacagga

SEQ ID NO: 11186 - DNA, 264 bp, Glycine max
  Clone ID: 701064147H1
ctacattcctcgacaagcttagcttcaccgtcagttgcaggaaaaatggtttcgctgaaactgcagaagcggctcgcagccagcgtcctcaagtgtggcagaggaaaggtttggcttgaccccaatgaagtcaacgaaatctccatggctaattcccgccaaaacataaggaagctggttaaggatgggtttattatcaggaagcccaccaagattcactctcgctcacgtgcccgccgaatgaaggaagccaagaggaaagga

SEQ ID NO: 11187 - DNA, 274 bp, Glycine max
  Clone ID: 701064149H1
ctgagtagcacactactctgaactcgccaggattttacgtgatcagtacccgacatatcaaattccagaaaagtctgcagacgataagccttatgtaccaacatttcaggtttccaaagaaaaagcaaagaccttggggattgaatttattcctttggaagtgagtcttagagagacagtggaaactttgcaagaaaagaactttgccaacttttagtctctgatatatctacttgatcaggagtcaacacgttgagactctcaacggtgtttc

SEQ ID NO: 11188 - DNA, 263 bp, Glycine max
  Clone ID: 701064150H1
tttctggttcacgatcccctactgattgctgttaatgtggtagtggactgttcgcctacataagcagagggagcatcgcttctcctcgccggaccaccggttccggtttgcttctcatcgtcggcggctatctcagtctcaatgctttcggcaaacggtaaaactcttacctcgatctctttctcgacaccgtttgtgcagccatactaacttgggtcatggggtagcgatatttggaaacatcccagattacgcctgctggt

SEQ ID NO: 11189 - DNA, 232 bp, Glycine max
  Clone ID: 701064152H1
ctaaagccttcaatcatatagcattctaagaaatgaagagccctaccattttcattctctttctactttctgccttctacacctcactcctaccttcagccaccgctcaagtcctggttgacatggaaggtaatgatcttcaaaatggtgggaaatattatgtgttgccagtaatagagtcatcatatggtggaatagagtatacgcaactggaaagcaagaatgcctctca

SEQ ID NO: 11190 - DNA, 245 bp, Glycine max
  Clone ID: 701064154H1
cagggtgatgctgacagtgccctagatcgcttgtggcagaagcagaaagttgaagttaagcaacagtagacacccatgatagtttgttactttgctatgtattaatttctacgcttgctagagatatttgagtactatgattgtcgtcttgagcaaatactcattctaaattttcgttggtatttggtaccgccagctaaatttgcttttttgacaaaaaaaaaaaaaaaaaaaaaagggggggc

SEQ ID NO: 11191 - DNA, 196 bp, Glycine max
  Clone ID: 701064156H1
cgcaagtgagcgtaggttggaagcagagagatggaaggttgcgacccgaatacgaagtcgacgctgacacagatccctctgctgacgacgaaggcgggtccacgagacggagcggcatggacgcagaggcttaaggcagagtacaaagctctgataacgtacacgcagatgaacaagtccgacgacaaagagtggc

SEQ ID NO: 11192 - DNA, 250 bp, Glycine max
  Clone ID: 701064157H1
aacactcttctctgcagcttttgcctacaactcccttcaccatggctgaacaaaccgagaaagcttttctgaagcaaccaaaagtgtttctcagcacaaagaagactgggaagggaaagagacctggaaaaggtgggaaccgcttttggaagtccattgggcttggatttaagactcccagggaagccatcgaaggaacctatattgacaagcagtgccccttcactggcaatgtttccatcgtggccgt

SEQ ID NO: 11193 - DNA, 252 bp, Glycine max
  Clone ID: 701064158H1
caggcagcctcgaaacctcgtccaattcttgtgcggtttatcatgggggatagtcagtattcgttttctctcaccacatttagcccttctggaaagcttgttcagattgagcatgctttgacagccgttggctctggagaaacgtctttgggaatacaagctgcaaatggagttgtcattgctaccgagaagaaattgccatctatattggctgatgacacatcatggcatgggtcccgatttcgagtttgg

SEQ ID NO: 11194 - DNA, 253 bp, Glycine max
  Clone ID: 701064159H1
ttttggcagcaaggatggcgtcgagaccagaggtagttgcgccgcctgagcttttctacgacgatgccgaagctcgcaagtacacctcttcttcccgtattgttcaaattcaggcgacgctgtcagagagagctctcgaactacttgctttggctgatgacagcgttcctaaattactccttgatatcggttgtggatcgggacttagcggtgagacactctccgagaatggacaccattggattgggcttga

SEQ ID NO: 11195 - DNA, 261 bp, Glycine max
  Clone ID: 701064162H1
ttctgattaagtgcctggtactgcagaacccttactttgttttggatgattgcgtcctccaagcatgatttggatactattgattatggttctcagacttagactttgccctttggtttttgatccataagatgtgtagcattcacttttttcctttcctctgcttcatacattttgctattttgttactcaatgtatgcttatggcaactctgccagattatgcgctgattcttcaagaaatagcactcaggaagtcatg

SEQ ID NO: 11196 - DNA, 271 bp, Glycine max
  Clone ID: 701064163H1
cggctcgagttctagtttcccgcagtcatgggcaatgtcaagatcggaatcaacggatttggaagaattggccgtttggtggccagggtggctctgcagagagacgatgttgaactcgttgccgttaacgatcctttcattaccaccgattacatgacatacatgttccaatactcacagtgttcacgggcactggaagcatcacgatgtcaccgttaaggatgagaagacccttctcttcggtgacaagccagtcactgtttttggacac

SEQ ID NO: 11197 - DNA, 267 bp, Glycine max
  Clone ID: 701064164H1
gagtagcggcattaaaaatgcagatcttcgtgaatactctgacagggaagactataaccctcgaggtcgagagcagcgacaccatcgacaatgtcaaggccaagattcaagacaaggaaggcattcctccggatcagcagcgtttgattttcgccggaaagcagcttgaagatggaaggacccaggccgattacaacatccagaaggaatcaacccttcatctcgtcctcaggcttcgtggtggcatcatgagcctccctcatggtt

SEQ ID NO: 11198 - DNA, 207 bp, Glycine max
  Clone ID: 701064165H1
ctttgttgtgagctataagctagtttatcgtgaggagaatatgaagtcgtatgtgttctttgttgctgcagtaggtttggtagcatggccatgacatggtgcagggtaccaaagggtccctctccgagtgacaactggctatagagagcgttcatcggaggtaaattccccaatgctcaggcttgctctggaacgacacaatatccg

SEQ ID NO: 11199 - DNA, 194 bp, Glycine max
  unsure at all n locations
  Clone ID: 701064166H1
ctttttatctcctaaaactaatagcattctgtcagtgggacccggacccctcgactacatcagcacagggagcatcggttctctcgccggaccgncggctccggtttgcttctcatcgtcgccggctatctcagtctcaatgctttcggcaaacgaagaaactcttacctcgctctctttctcgagaccgtttg

SEQ ID NO: 11200 - DNA, 259 bp, Glycine max
  Clone ID: 701064167H1
ttctgattcctttcttcagaattccaagttttcatttcgttagggacaaaagattgtgagatagagtatggctggataatgcgaaggtcctgctatcggaatcgatttgggaacgacgtactcttgcgtcggcgtgtggcaacagatcgtgttgaaatcatagccaacgatcagggtaatagaactaccccatcctacgtggctttcaccgaaacagaacggttgatcggcgatcggcgaagaacaggtcgctatgaac

SEQ ID NO: 11201 - DNA, 256 bp, Glycine max
  Clone ID: 701064168H1
ctttcttttagctctttgttaagtttctaatcctagagcttgttctggacatggtagaaccgccgaaaagttcacattgtaatgtatccttggggagccttcggacacttaatcccacagcttgagatggccaaactgcgttgcgcaacagggtcacaatctcgcgctcgtgtccatcccaagtcagctccagggtctccccgaactgtgcgcaaatctggtttcagtcgtccatttgtggaggtccatgaccaag

SEQ ID NO: 11202 - DNA, 185 bp, Glycine max
  Clone ID: 701064169H1
ctactccatccgcaatgggcatcgatttgaaggcaatacgtaagtcctcggagaccaatagctttggcaccagattcgatgatatctcactgattcatattgaaactccgcattgcagttgctgctctcttgcttaggagtcacttgcgtgctggcgtcttcacttgaccggccagggtacgcgt

SEQ ID NO: 11203 - DNA, 200 bp, Glycine max
  Clone ID: 701064170H1
cttgacagataatgctatcttcattatatcaaaactgttacacggtggcattcttgtctaccattacaataagaacacacggaaacttgataagttatcttgcagcttgatcttagatgcaagaacgcatattgttaaggttctctatcggacggagggacttctagtatgacaaggttggtgctatagacgagtactcc

SEQ ID NO: 11204 - DNA, 188 bp, Glycine max
  Clone ID: 701064171H1
actttctctctctttgtaacttgtaagcatggagtcctcaaagatctatgcttacctcttcctttgcatgcacttcctctcctccgcaactcccattctcggttgtcgctactgtggcaaaccccctaaaaagcacaaggaccgtagaacatcagagacaccctcagtacccgttcttaagccaccag

SEQ ID NO: 11205 - DNA, 214 bp, Glycine max
  Clone ID: 701064172H1
cactctctgctttctctcgatcagggtttcccctcgtctccgagctcgactcgttctcgaagaatcgatctgcgataatgactcgcggtaaccagagggatcgtgatcgcgaaagggctcaggctagaaccggtggtaaaggcaagcagatagatgatgcgttgacccctgaacagcgcagggaaagacatgcgaaggcgctgcaggagaaggc

SEQ ID NO: 11206 - DNA, 261 bp, Glycine max
  Clone ID: 701064173H1
gttgcaggaaaaatggtttcgctgaaactgcagaagcggctcgccgcgagcgtgctcaagtgtggcagaggaaaggtttggcttgaccccaatgaagtcaacgaaatctccatggccaattctcgccaaaacataaggaagctggttaaggatgggtttatcatcaggaagcccaccaagattcactctcgctcacgtgctcgtcgaatgaaggaagccaagaggaaaggacgtcactctggatacggtaagcgtaagggt

SEQ ID NO: 11207 - DNA, 257 bp, Glycine max
  Clone ID: 701064174H1
gttttggtcagtgaagtcttctccttcaacaacaacaaggggttgcagttaaaatggatgaagctgaatttcaacgccttctccaactcttccccgttgttcgttctcgcgattacactgcagaagcatcatcatccaaacaaattgcatctgggtcagcacagaatgaggtaaaggaatggcaagatgcatgggatgaaagggataaggattttgagaagcaaggaattaatcaacaagattcattttggagcaag

SEQ ID NO: 11208 - DNA, 257 bp, Glycine max
  Clone ID: 701064177H1
ctaagacggcgtcttcataaacgcctttcttctccgtttccgtttcctcgttcgaattcgctttttgatctgcgaaaatgagagagtgcatctcgactccacattggtcaggctgctatccaggtcggaaatgcttgctgggagctctactgcctcgagcacggcatcgggctcgatgggcaaatgccaagtgacaagacagttggcggtggtgatgatgctttcaatactttcttcagcgagactggtgctggaaa

SEQ ID NO: 11209 - DNA, 137 bp, Glycine max
  Clone ID: 701064179H1
aatttctctctgtctcgtttacacatctctccaacctttcactttcgtttctcagttttattcgaatccctctctgaatctgctttccaaatggccagcgctgaggttgcacagtaagcacaaacaacagttccaga

SEQ ID NO: 11210 - DNA, 272 bp, Glycine max
  Clone ID: 701064180H1
ctattaactatgaagcctaccctactattatccctttccttcctgcctctctttgctttcctggctctttcagaagatgtcgaacaagttgtggacataagtggcaaccccattttcccaggtggcacatattacattatgccatcaacttggggcgctgccggtggtggattgaaactaggccggacaggaaactcaaactgcccagttactgttttgcaagattactcagaaatcttccgtggcacaccagtcacattcagcatacctgg

SEQ ID NO: 11211 - DNA, 259 bp, Glycine max
  Clone ID: 701064181H1
ctcttctcagatcttatcttaagatggcaaccttgatcggttgccaatactactatctcttgttccttctttggtttatctctagcttaaccttcttattgtttttggactatcatgttatgtttctacgtgacaaaatactactatttggtaacattcactcctttgacgttaatagaccagtgtcttcatcgctggctcgttgctgggatcagttcagcccagtaatccctcttggcctttatgcagacttgcaaac

SEQ ID NO: 11212 - DNA, 270 bp, Glycine max
  Clone ID: 701064182H1
cgatatcactatcacatctcatcctcttattctaccatggccttcccacctcctcacggtttcacgtttaacactactcatgaagaagatcaccaccacctccctccaacctctctcaaccccttcccctctttgccaccccaacactttcaagggggtgcatctttcatgttgaagcggtccatgtcgttttccggcattgagaacaagtgcgatgaagtactacatggagacgatgagttatccgatgatgggatcttccagtgtggg

SEQ ID NO: 11213 - DNA, 211 bp, Glycine max
  Clone ID: 701064183H1
cgttcgtcaccatgactttcaagcgcaggaatggaggtcgcaacaaacacggccgcggccacgtcaagttcattcgatgctcgtactgcggcaaatgctgccctaaggacaaggctatcaagaggtttctggtgacgaacattgttgaacaggctgaagtcagagatctgcaggagggttgtgtctacgaacaatacacgcttccgaagct

SEQ ID NO: 11214 - DNA, 171 bp, Glycine max
  Clone ID: 701064185H1
ttatgattagatgaatatatttatattctttcttgactaagaagtaagatgagggagacggcttatctcacaatgatgggttcgcactggccgacgatgactatgtgactatcgacatggggtaacgagatgagccaccagagccagagattgaggaaggtgaagagggaa

SEQ ID NO: 11215 - DNA, 246 bp, Glycine max
  Clone ID: 701064186H1
tgcgtcgagaaggttcagttcagatcctccgtctccaccatacgcaatcacaatgcatcgtcggcatggaccgaggaactttcctcaatagcagctcgcatcgtcttcatgctcatcatgctttcagatcgctctattcagggtgacttgcagatctggcatgtgtacaaccccgttgcatgtcacgtcgtcacgattaattgcaagtgagaacttcctgttgttcttgtgaaggggcttctgtac

SEQ ID NO: 11216 - DNA, 257 bp, Glycine max
  Clone ID: 701064188H1
gagatatgggatgccatcagaagcataaggatagtcctcaatcaaaagacgaactccatggggagcagatgggtccttaacagcaactcctctctttacaagatcattaggtaatgcttgatcagtgaaaacccagtccttgtaaatgacagcggacatttccatagagtacctaccccacaagaatgttttctctataataccatctgcattgaccagggctttccgggcaagtgaattaatattcatggtgtcac

SEQ ID NO: 11217 - DNA, 259 bp, Glycine max
  Clone ID: 701064189H1
atttgagggtctctgccatgtgatcaaggatgtgttgggtgacaaggtggagaaagttgtggtgtctgatcgtgttgtggattctccttgctgtctcgtgactggtgaatatgggtggacagccaacatggaaaggattatgaaagcacaggcattgagggacagcagcatggctggatacatgtcgagcaagaagaccatggagattaaccctgagaaccccatcatggatgaactgaggaagcgagctgatgctgac

SEQ ID NO: 11218 - DNA, 259 bp, Glycine max
  Clone ID: 701064190H1
tgatgataaaatggcggaataccttgcttcactgaatcatgaagaaacaagactagcagtttcctgtgaaagatccttccttgaaaagttggaagggtcttgccgcactcctattgcaggctatgctagcagaaatgaggatggcaattgcttgtttagaggattagttgcatcccctgatggaatccgtgtgcttgaaacttccagaattggcccatatgcgttcgcagatatgataaagatgggtaaggatgctgga

SEQ ID NO: 11219 - DNA, 240 bp, Glycine max
  Clone ID: 701064191H1
ttcagtgagagatcgttgttcacttgatcttatcataatcgacagcgtcaattgatgaacatgctgatcagacacatcgccgtcggaaagtctgaagaagtgactcatcccgacacgttgaaggaggctttggctgagttcatctcaaccttcatcttcgtgttcgccggattaggctcctgcatcgcctacaacaagctcatcgacaacggcgctgactatcctgccggcctcatctcc

SEQ ID NO: 11220 - DNA, 246 bp, Glycine max
  Clone ID: 701064193H1
gtttgttgtgagctataagctagtttatcgtgaggagaatatgaagttgtttgtcttctttgttgctgcagtagttttggtagcatggccatgccatggcgcaggctaccaaaggttccctctccgaatgaaaactggctatggtgagcgttcttcggaggtaaaatgcgtcagttttaggcttgctgtggaagcacacaacatccgagcctttaaaaccattcctgaagagtgcgttgaaccaac

SEQ ID NO: 11221 - DNA, 263 bp, Glycine max
  Clone ID: 701064194H1
ccgcttcacaaattctcagtctacgacttgggtgttggatttcattaagttgtgataaacatgggaaaagactcaaagccaaaggagtccggaggcaagggaaaggggaaacaggctgcaagtggaagtgatgagaatgcttctaagggaaaaggaaaaggtgggaaaggtggagatgggcttggtacttgcacctatgtcaaagctaggcatatcctatgtgagacacaaggtaagatcaatgaagcctacaagaagctgca

SEQ ID NO: 11222 - DNA, 267 bp, Glycine max
  Clone ID: 701064195H1
tgcctatcctacctgatgcagggaggaacaccttcaacactttgctgcagcggagtcaagaacattcttggctctgctgtcaccaccgttgacaaaccaactgtgtgcaactgtctcaaggcggatgctgctaggtacaacatcaatgaccagtatcctcaggcactccctggtttctgcaaggtcaacgtcccttacaagatcagccgctccactaactgtgcaagcatcaagttctgaacaagccatggacagatttgctcattt

SEQ ID NO: 11223 - DNA, 281 bp, Glycine max
  Clone ID: 701064196H1
cctcaaacgtagtatacgagttcttcacagcacagagccttccagcgttattatttttatattatctatgtacatagaacatgggagttctccggtacatttgagtacttgtctgatctaatgggcagtggccatcatcaccataagaagaagaagaagcagcttccaaaccgtggagctaaatgtgagaatggattgtgatggttgtgagcttaaggtataaaacgctctctcttcactaagtggggtgaaatctgtggagatacaccgctaacagcaga

SEQ ID NO: 11224 - DNA, 280 bp, Glycine max
  Clone ID: 701064201H1
gcctctgtagaaatttgtgatggcatccgctatggtgaatcgaggtggttctaggatcatcaaatcagtgtctgcagctcttggtacgaggttttacgccaaggttgcaacagggactgacatagtctctgccgcacccaatgtttctctccagaaagctcgtacctgggacgagggcctggcttccaagttctccaccactcctctcaaagacatcttcaaggacaagaaagttgtcatctttgggctcccgggtgcatacacgggagtttgttcaaac

SEQ ID NO: 11225 - DNA, 278 bp, Glycine max
  Clone ID: 701064202H1
cggtttttgagtgcggtgcggcgatcctagcactctcttctgcagctttcgccgacagcttcattcaccatggctgagcaaaccgagaaggcttttttgaaacaaccaaaagtgtttctcagctcgaagaaaactgggaagggaaagagacccggaaagggtgggaaccgcttttggaaatccattgggcttggatttaagactcccagggaagccatcgaaggaacctacattgacaagaagtgccccttcactggcaatgtttccatccgtggccg

SEQ ID NO: 11226 - DNA, 275 bp, Glycine max
  Clone ID: 701064203H1
ctcttctttttactctctttctgtctctctctacgctttctcgttcgacatccctcaagggatccactaactgaaggagaaatggggttgacattcaccaagcttttcagccggcttttcgccaagaaggaaatgcgaattctgatggtgggtctcgatgcagctggtaagaccaccatcctgtacaagctcaaacttggagagatcgttaccacaattcccaccattgggttcaatgtggagactgtggaatacaagaacattagtttcactgt

SEQ ID NO: 11227 - DNA, 272 bp, Glycine max
  Clone ID: 701064204H1
gagaaaagataaaaaaaacaacagtggtacgtgatgccaccgaagttcgatccctcgcaggtggtggacgtgttcgtccgagtcaccggcggcgaggtcggcgcggcgagttctctcgccccgaagatcggtcccttgggactctccccaaagaagatcggagaggatattgcgaaggaaaccgcgaaggactggaagggccaccgcgtgacggtgaagctaaccgtgcagaaccggcaggcgaaagtgacggtggtgccatccgccgccgc

SEQ ID NO: 11228 - DNA, 265 bp, Glycine max
  Clone ID: 701064205H1
ctcttcttctcttgcggcttgggttttagcgcagttcttctagatttaaggaagatgagtaaggaaaaggttcaactcagtattgtggttattggccatgttgactctggcaatgtcactaccactggccacctgatctacaagcttggaggcattgacaagcgtgttattgagagatttgagaaggaagctgctgagatgaacaagaggtctttcaagtatgcctgggtgcttgataagcttaaggctgagcgtgaaagaggaa

SEQ ID NO: 11229 - DNA, 266 bp, Glycine max
  Clone ID: 701064206H1
cattcttaaattataaatatttcggtctgtgaagatatatgtccataagttccttaattttctcgaaccttcattttcagctcccaacaacaatggcttcaatggcatcttcaagctccttctgcaacctcaagttcatcaccaaacccaacaatggtagaagaagctctcttccccgtattgtattctgtcagaagcaccacgatagcacacccaccgaccaaatcaaccgaagagaactcatattgagaagcagcgaaatagcg

SEQ ID NO: 11230 - DNA, 262 bp, Glycine max
  Clone ID: 701064207H1
tctattgacactgtaatggtgccaaattaagtgctcatttcttcttgtagtgattattagaggatttgatcgttaacaatttctcttcttatttgtttaatgtttttggtttcttaggtgaattattcaagaggacccgacaatcccacaaagcagaaagagaggttgttatgttatggcgggcaaaggtgttggttcagtggctaaggcagtagcagaatatcagtatccttggcgtgagaagttggcgaaatataaggat

SEQ ID NO: 11231 - DNA, 261 bp, Glycine max
  Clone ID: 701064208H1
ggacaacaaccacaatcatcatcagaaaatgggagagaatcagaggattatggagaagaagggagagaaaagggtcctcatcctcttgctcaagctggaactggctctttccctggaggcttcattgggaaacataggttgcaagcagccataaccaacctcaataaccaaattagtattttgcaggaagagttgtataaagttgaaacaattggtgaatcctccaccgtttgcaaggatttaatttcaagcgttgaatcc

SEQ ID NO: 11232 - DNA, 263 bp, Glycine max
  Clone ID: 701064209H1
caggttggagtgagcgaagaatacgtattctagcgattcatggggtggaccgttggagataaacgccacggactcggcgacggaggacgagcggagcggaacctgcaggacgttgacagggcagcgctgtcgcgtcccttggatgagacgcagcagagctggctccttggccccggcgagcagaagaagaagaagtacgtcgatctcggctgcatcatcgtcagccgcaagatcttcaagtggaccctcggtacaatcctctt

SEQ ID NO: 11233 - DNA, 183 bp, Glycine max
  Clone ID: 701064210H1
tcaaggttttctattttgtctctgcatgctgcgtgcttaattcaactaatattcaatcaggtatgttgctgaggtttttcagatttattatctccatgacattcttgtaataagaagcaattaagctgtatgacatcttctctttaatataatattaaaggtagtacagctgagattcctatt

SEQ ID NO: 11234 - DNA, 258 bp, Glycine max
  Clone ID: 701064211H1
gtgatctgaaggatttatacataaactcagccgtgcaagttgatgtttctggaaaccgcaaggctgttgttattcatgtcccttacagattaaggaaaggtttccgtaagattcatgttaggcttgtcagggagcttgagaagaagtttagtggcaaggatgtaatcttggttgccacccggaggattttgaggccaccgaagaagggttctgctgctcagcgtcctcgcagccgcactcttactgctgttcatgaag

SEQ ID NO: 11235 - DNA, 257 bp, Glycine max
  Clone ID: 701064213H1
ctacgtctgggtagctgcagggaatcagccagatcttgagaagaacgtgggtgttggagggtacggttatccagctttagtggcccttaaccttaagacagctgtttatgctcctctcaagagtgcttttgaacttgaccagattatagaatttgtgaaagaagctggacgtggaggcaaagggaatttgcccctgcaaggcactccaaccattgtaaagacagaaccatgggatggccaagatggagaaataattg

SEQ ID NO: 11236 - DNA, 259 bp, Glycine max
  Clone ID: 701064214H1
ttcccatcccatcattattagctggctctataaccttcttctcaatactcctccactctctttatattcacctcaaaagtctcactcttttttctcacttctatattccataattaatccttctattgtttctttctctccttcaatctcaagtctcaaaccatggcgtttagaggaggcactatgttgatattaacaatgatggcattacttgagattcagatatgctcatcggagataaaccgtggaaactttccaa

SEQ ID NO: 11237 - DNA, 264 bp, Glycine max
  Clone ID: 701064215H1
gggttcttgaggaagaagaaaaaaaggtgaaatatagagtgaagaagaagaaatagagggttttggtgtttgaatcgtgaaaatgttcagaaaccagtacgacacggacgtgacgacatggagcccggcggggaggctgttccaggtggagtacgcgatggaggcggtgaagcagggctcggcggcgatagggctccgatccaagacccacgtggtcctcgcatgcgtcaacaaggctaactccgaactctcatcgcaccagaa

SEQ ID NO: 11238 - DNA, 261 bp, Glycine max
  Clone ID: 701064216H1
cacaaaagcccaaccctctctctcgctgctggtctcccccatttggcattcgcagatcgaatacgagtaatttcactgaatcttattgaagatgtttctcacaagaactgagtatgaccgacgagtcaacaccttttactctgaaggtcgtttatttcaggttgaatatgcaatctatgccatcaagctgggatcaactgcgattggattgatgacgaaagatggtgttgtacttgcagttgaaaagcgcatcacttcacc

SEQ ID NO: 11239 - DNA, 258 bp, Glycine max
  Clone ID: 701064217H1
tccttcaatcatatagcattctaagaaatgaagagccctaccattttcattctctttctactttctgccatctacacctcactcctaccttcagccaccgctcaagtcgtggttgacatggaaggtaatgatcttcaaaatggtgggaaatattatgtgttgccagtaatagagtcatcatatggtggaataagagtagccgcaactggaaaagaaagatgccctctcactgttgtacaatctgccgatccgtatgat

SEQ ID NO: 11240 - DNA, 268 bp, Glycine max
  Clone ID: 701064218H1
tactctttcactctctagattctcatctatctttcttccaacctcttctcttctatacccttcagaaaaaaataaaatagaaaccatagcttcagattattctagctcttcattttttttccttgttcaatattatgctgtaaaattctcaaactcacagtttcagttcagccacattttggtctaaagatccgtgccttgacccttggcagtttcagctttccaaagggttggagtttttcttcctcataagcactgaatagtcaaa

SEQ ID NO: 11241 - DNA, 271 bp, Glycine max
  Clone ID: 701064219H1
gtctcgccgactcggttgctatcagcgagtgagagtgagtgagtggttctcttgcagcaacaaggtttagtgacaccaaacagacgggaaatgggtcgtggggtcagtgctggtggtggacagagttccttggattatctctttggcagtggggtacctgccagcagtgcaaatgcgtgctcgcactcaaaatgcaagtgctccttcaccaccggttgataagcaaagtccagcaccagcaccagcaccagcacctgcacctgcagcagca

SEQ ID NO: 11242 - DNA, 216 bp, Glycine max
  Clone ID: 701064220H1
cctgcctcaacgggcagtccgaaacgcagcatttcccgtgttgtgacgctgaccgaactatccgattcttggctgagaaattacgagcattcggtctgcagtatctgtgtgtctaccttctgtctctctctgacctctgatatatctgtatattggttttctgtgtgtctatgatcaggatccaacggtctaaaatgttcggggcttgtgctgttt

SEQ ID NO: 11243 - DNA, 264 bp, Glycine max
  Clone ID: 701064221H1
cagaatcgtaacagaaacggtcactggaagttgtctctaccaccctctcacccatggcaacaattccccctagccgatcatcatcacacgcgtttgttgccatggcaaccttcacgactctgttgttgtgcacggcggcggcgaaggagagcgtgtacgagatactccccaagtacgggctcccgagtggtctgttaccggataacgtcaccgactacaaactcgacgaggatggccaattcgtcgtcgttttgccgaagccct

SEQ ID NO: 11244 - DNA, 264 bp, Glycine max
  Clone ID: 701064222H1
caataatctattttatactatacccacattttgataattatctttttatattataagccatggctactcgaggaaagcttgctgttgacgttgatctcaagtctaacgcagacaagtactggcaaaccctttggaactccactgaaatattctccaaggccttccccaatgattacaaaagcattgaggttcttgagggtgatggcaaatcacctggttctatccgccacataagttctggtgaaggttcaccacttgtgaagt

SEQ ID NO: 11245 - DNA, 262 bp, Glycine max
  Clone ID: 701064223H1
gttgagaactaagaaggagaagcaaatggcttcctcaatgatctcttccccagctgttaccactgtcaaccgtgccggtgccggcatggttgctccattcactggcctcaagtccatggctggcttccccaccaggaagaccaacaatgacattacctccattgctagcaacggtggaagagtgcaatgcatgcaactgtggccaccagttggccagaataagtttgagactctttcctacctgccagaccttgatgatgca

SEQ ID NO: 11246 - DNA, 260 bp, Glycine max
  Clone ID: 701064224H1
gttcactccattgttcgcgaagtggtgaggaacgtttccaagaaagatccccgcatgcttgccagtctcattagacttcactttcatgactgttttgttcaaggatgtgacgcatcagttttgttgaacaacactgccaccatagagagtgagcaacaagctctgccaaacaacaactctctaagaggtttggatgttgtgaacgacatcaagacagcagttgaacaggcttgccccggcgtggtttcttgtgctgatat

SEQ ID NO: 11247 - DNA, 258 bp, Glycine max
  Clone ID: 701064225H1
ctcacctcaacacagcagaagcaacaatgaagaagaagatgatggcaagcacggccatctccctcgtcatcgccgcgctcttcctcttctcctccgtccactctttctacctccctggtgtcgctcctcgcgatttccaaattggtgacccccactttgtcaaagtgaacaagttatcatctaccaagactcaacttccatatgactactacaacatgaagtattgcaaacccaaaacgatattgaacaatgcagaaa

SEQ ID NO: 11248 - DNA, 259 bp, Glycine max
  Clone ID: 701064227H1
aacgcccaaagcgctgctgaatggccgccacattcccttcctccgacatccacgacctccgctcgccgatgctaccagcggcggcggtggcggcgaagaagccggcgatggagaagctctgcatcgacgacatgctgcagaaacactgcggcgagttcgggcggtggcagctcaagcacttcatcctcaccagcctcgacctggcgctcgaggcctttcacaccatggtcatgatcttcgccgaccgcgaaccggactg

SEQ ID NO: 11249 - DNA, 259 bp, Glycine max
  Clone ID: 701064228H1
caatccgtgccttgaacctatctaccatcatcaattggtacgcttggtatgataatgacgaggttggtggctggagtcaagtttatgaggggcttacattggttacagtaagaggggcagggcacgaggttccacttcataaaccccgccaaggttttatccttttcaagacattcttggaggacaagaacatgccattgccaattgatagaagccttagtggcccaactgataaatcactgaacaagaacattcggtt

SEQ ID NO: 11250 - DNA, 256 bp, Glycine max
  Clone ID: 701064229H1
gataactagaaacagtgtgatgaaaatgaaggtccttgttttcttcgttgctacaattttcgtagcatggcaatgccatgcgtacgatatgttccctctccgaatgaacactggctatggtgcccgtactccggaggtgaaatgcgcaagttggaggcttgctgtggaagcacacaacatctttggctttgagaccattcctgaagagtgcgttgaagcaacaaaggaatacatccatggcgaacaatatagatca

SEQ ID NO: 11251 - DNA, 261 bp, Glycine max
  Clone ID: 701064230H1
aagccaccgtaccgtgttgcctctctgcaatctacagccaaaatgcctttcaagaggtacgttgagatcgggagggttgcccaaaccaactacggcaaggaatatggcaggctcgtcgtcattgtcgacgtcattgatcagaacagagctcttgtcgatgcccctgatatggtgaggtcccaagtcaatttcaaaaggctttccctaaccgatattaagattgacattaagagggtccctaagaagaaagatcttgtcaaa

SEQ ID NO: 11252 - DNA, 264 bp, Glycine max
  Clone ID: 701064231H1
catcgctccgcaccagtttcaccgcacgaatatcttgttgtttggagcgatccgagaaaaactctgtaaacatgttggtttaccaggacctccttacaggtgatgagcttctctctgactccttccgttacaaggaaattgagaatggaatgctgtgggaagttgaggggaagtgggttgttaaaggagcagttgatgtagacattggtgcaaacccttctgctgagggtggaggagaagatgagggagttgatgatgcagctg

SEQ ID NO: 11253 - DNA, 248 bp, Glycine max
  Clone ID: 701064232H1
cattcagctgcacaaagaatcccaaattagagaaacagcacactctcacctcactcacttgtccttgttatatttgttttatatcttgtcacaatctgtgactgttcgagttatccgaggcccctcttttatatggtcgttgataaaatggcttcgacccttttaacaaagatgcttttgggtcaccgattgatacacccttcttcgttcctcactcaccagccacacgatctctcttctctattcag

SEQ ID NO: 11254 - DNA, 277 bp, Glycine max
  Clone ID: 701064233H1
cttatcatcataaaaacgagaaacgaatgattcacattagccaaaactaaacgccgctctatttccgtctcattttcactcactatggcttccgatgagaccatgaactttcactcttgttcgttacacgaagatgactttgatgatgatgatgatgatcacccccacaacttgtcgagactctccgtgtgcactggcagcactttggtgtcgacgacgatgttgacaatctggactccatgtgcgtgtcacacttgtccatcgaaagcttcgacgc

SEQ ID NO: 11255 - DNA, 182 bp, Glycine max
  Clone ID: 701064234H1
atcaactccttggggtgatttggaaatctatcaatataatggtaaatacagtgaacatcgagctgctgcagataactcaggaagcattgatgatgttgatgctaaatcaattgaattcaatccatggcagtatggtaatttggccacggaatgaactagtttcaattttcttttggtttttg

SEQ ID NO: 11256 - DNA, 269 bp, Glycine max
  Clone ID: 701064235H1
ctgttttctcggatatcgaaaaacctcagaggcagcttcaactcttgtcggtggtttcggtccatcggagaccacaaccactgctttctctccccgcacaattttcattcacgcggtggagactctactcaacaggttatgagaagtttaattttttcaaagggcccagcactgcatagtagtagatatctgatccatcatcaaagcagctccatagttgagatgaactgtcacttcttggcaacaagttgcgagcaatggtagttgct

SEQ ID NO: 11257 - DNA, 267 bp, Glycine max
  Clone ID: 701064236H1
gtagccatggccagaatcgcacttggaagcacccgagacgccactcagccagactgcattcaggccctcatcgttgaattcatagccaccttcctctttgtctttgttggcgttgcttcttccatggtcgttgacaagcttggtggggatgcactagtgggattgtttgctgtggccgtggcacatgcacttgtggtggctgtaatgatctccgccgcccacatttctggtggccacctcaaccccgccgtcaccttggactccttg

SEQ ID NO: 11258 - DNA, 259 bp, Glycine max
  Clone ID: 701064238H1
cggagggatatggaatggtggtgggggagctggagaaaacaacttttttattgcctcatttttctttgaagttgccgatgaggctggttttgttgatccaaacgcccccaatgccaaagttcgtcctgtggattttgagaatgcagcaaaggttgcctgtaacacagaattaaaggatctcaaatccattttccctcgtgttaaggatggagacgttccttatatatgcttagatcttgtatacgaatatacattgctc

SEQ ID NO: 11259 - DNA, 257 bp, Glycine max
  Clone ID: 701064239H1
atccagatcttccttcaaatcgacaccaaccaaacgccgccgcaacctcggagaagatgacaatgaccttgcatgcacctgaccaaacatcgttgcaacctcgaagaagacgatgacaccaccacaacttgaacgaatgggttcaaagacaagcatttccacatcttttttatttattattttttttcatttttaattgttgttgaattttgttcaatgctaggacgacatctatgttggtgttggtgttgttgtgt

SEQ ID NO: 11260 - DNA, 255 bp, Glycine max
  Clone ID: 701064240H1
cttttattgaaatcctcaagcttcaatttgctttgtgctcactcatctatctattataaccaaacactcttcttcatattcttcttcttcttcttgttcttgttctatctgtgacgagcatcatggcctcgagagcagtgctattgttggctatgtgtgtgcttccggccatggttgtggccattcgcccagcaaagaaccctttttgcgtgaagggtcgcgtctactgtgacccttgccgtgctggttttgaga

SEQ ID NO: 11261 - DNA, 257 bp, Glycine max
  Clone ID: 701064241H1
aacggacgatccgaagaatacccttttcatctctctctacaataatcatcatcttcctcttcttcttcagtaaattattgtacctgacgatcttctcggtttgatcttatatcaatggaatttttttagacagaactcggattcacagggaaatctgattgcataggaacaaaaaagacaacacctttttatctctacacaagtgattatggcggttgctgagaatgttggggccaaaatcggttcttccagtcaaa

SEQ ID NO: 11262 - DNA, 257 bp, Glycine max
  Clone ID: 701064242H1
gagtgagagacggcaaagacggaggagaggtcgcatacgcaaaaatggtgaagtttctgaaaccaaacaaggccgtcattgtccttcagggacgctacgccggcaagaaagccgtgatcgttcgaaccttcgacgaaggaactcgcgagcgcacctacggccactgtttggtggcggggataaagaagtaccctgcgaaggtgatcaagaaggactcggcgaagaagacggcgaagaagtcgcgcgtgaaggcgttc

SEQ ID NO: 11263 - DNA, 253 bp, Glycine max
  Clone ID: 701064243H1
aaaacatttgtcagatttcaaggatgaccccgacctctatgttttccccaacttgaagtacgtggggattgaattgtggcaggtgaaatctggtactttgtttgacaatgtcttaattactgatgatcctgagtatgctaagcagctggttgaagaaacatggggcaaccacaaggatgctgagaaggcagcatttgaggaggccgacaagaagacggaagacgaggaatcaaaggatgacccagttgactct

SEQ ID NO: 11264 - DNA, 252 bp, Glycine max
  Clone ID: 701064244H1
ctaatatagaaatggcgtcgtggtgcggtgctcggagcttccacattccggcgatggaagacagcgcactgcgcaaccgtgcttcattggccgccggagtagggtgtttgtcggtggccggcacctccttctggcgctcctcttcgtcaccgaagcgctctttgccattcacatgcttgagcatttcttccgatactcgtattaaggacagtgttcaaactgaaggtgcacccccggtttgggaccatattc

SEQ ID NO: 11265 - DNA, 258 bp, Glycine max
  Clone ID: 701064245H1
caggaatttaatgaaaccttatatgatgaatgggttaacaagggcgacgcaccggcattgccagagactcttaaaaattacaacaagctgttgtctcttggcttcaagattgtattcttgtcaggaagatatcttgacaaaatggccgtaacagaagcaaacctaaagaaggctggcttccacacatgggagcagttaattctcaaggatccacatcttatcactccaaatgcactttcatacaaatcagcaatgaga

SEQ ID NO: 11266 - DNA, 241 bp, Glycine max
  unsure at all n locations
  Clone ID: 701064246H1
ctttcctaatcccatgtactacattgagtagtaccttcacctctctcaacaatctagctagagtttgactctatctatatgctataaggtatgctgatatgcactattcatataggagcattagctatgtttgttaatgtcactttatgttatgtgggtaagtcacctaagacactccacgtanntacttgttgtctcttacgcggctttaataaatcttctgcccttgttccatatttag

SEQ ID NO: 11267 - DNA, 260 bp, Glycine max
  Clone ID: 701064247H1
caccggcgaacagggagggcaaaaacagagcacagggaaacgaggaacaagaagatgatgactacatgggtgacctttctcagtttcttccttccgatgctctcttccctcccaagttgttttcatccaaaaagatttccagcaagaaagatccttcagtcaattcttccaagaaccggttgaaaactcatagctggcaagaacggagaaaacttgacagagaaaggaagcaacaagaagaggatgagcaaacattagcg

SEQ ID NO: 11268 - DNA, 264 bp, Glycine max
  Clone ID: 701064248H1
ttaaaactcatcctcattctcccttcatcttctccgtttccaaaaccaacccactttacttctctttgctccccacttctatctctcttctctcactcaaacaacccccaccctctctctcttccaatcttctcagggtttcaaatgttggagtttcagtttgcagaaccgaacaccacgaagaagaggaagacaagggggtttcgttggagcttcacgacttgtccccaaatggggaagtgtatcagacaacgctgcaattgg

SEQ ID NO: 11269 - DNA, 223 bp, Glycine max
  Clone ID: 701064249H1
aaaataaaacacaccctctacgtgtccacactctatgatcacacaacaccagattaattaaatctctatatataaaccccttcaggcaatccactatgaagggcaaaaccatttttcataagatgaaggaaaaagttttgggatcatctgatgccgattcaggtaaagggaagatcaagatgaagaagcacataggtcatggagttcacttggttaagggaag

SEQ ID NO: 11270 - DNA, 196 bp, Glycine max
  Clone ID: 701064250H1
cttcacttcaaacttgccaatctcgaagatggcaatagaattggcaactcccaattgggttccaaccgcagccgcatgtctggcagccttggccgccctcctcctcttcctcctccgcggtcaccgccgccgtaaatacaatctccccccaggccccaagccatggcacatcataggcagcctaaacttaatcggc

SEQ ID NO: 11271 - DNA, 266 bp, Glycine max
  Clone ID: 701064251H1
caacaatcatgtcggacgaagagcaccatttcgagtccaaggccgacgccggagcctccaaaacctaccctcagcaagccggtaccatccgcaagaacggctacatcgtcatcaaaggccgcccctgcaaggttgtggaagtttcgacttccaaaactggaaagcacggtcacgctaagtgtcactttgttggaattgatcttttcactgccaagaaacttgaggatattgtgccctcttctcacaactgtgatgttcctcatgtg

SEQ ID NO: 11272 - DNA, 266 bp, Glycine max
  Clone ID: 701064252H1
ctggtttcggattggagggattgacgctgcgtctcttcctcttctctttcgatccacccctcattcctactctcccaatccaaccacctcagcctcacactcacatatacacatatctgaacgcgtatcgtccctcctatggcttcaaagcgcatcctcaaggagctcaaggacttgcagaaagacccaccaacttcttgcagcgctggtccagtagctgaggacatgttccattggcaagcaacaataatgggtcctgctgatag

SEQ ID NO: 11273 - DNA, 259 bp, Glycine max
  Clone ID: 701064255H1
cttgaggctagggttaccggattcttgcgttttaatatctgcaattcagaagcatggggcactccaatgtgtggaattctcaccctaagaactacggacctggttctcgcacttgccgtgtgtgtgggaatcctcatggattgatcaggaaatatgggcttatgtgttgcaggcagtgcttccgaagcaatgacaaggaaattggcttcatcaagtatcggtgaaagattagttttccacctgccccacccggtttgga

SEQ ID NO: 11274 - DNA, 247 bp, Glycine max
  Clone ID: 701064256H1
cctttgttgtttcttgtggttttggagtctgcagcaatgtggggttcgatggtcggggaagcgcgtagggcagcgtgcaactggaactgggtttcgctccgaagcatgggtggcggtcccagaacctttctcggcggagtgaacaagtggaagtagaaccgcatgcacgaaaagctctacagagactggcagaacagaatcataccacgagagaagcagctctagccagctccgattcggtcccaca

SEQ ID NO: 11275 - DNA, 255 bp, Glycine max
  Clone ID: 701064257H1
ctacattcctcgacaagcttaacttcaccgtcagttgcaggaaaaatggtttcgctgaaactgcagaagcggctcgcagccagcgtcctcaagtgtggcagaggaaaggtttggcttgaccccaatgaagtcaacgaaatctccatggctaatactcgccaaaacataaggaagctggttaaggatgggattattatcaggaagcccaccaagattcactctcgctcacgtgcacgccgaatgaaggaagccaag

SEQ ID NO: 11276 - DNA, 254 bp, Glycine max
  Clone ID: 701064258H1
cttgaaacagataaacactcatccctcatcgtactcttccgttatcaattctcgtgtttaagtctgcctacgttccgcttcctttgccatcagagcaagtccacgctttgaaccccgtcgggtcacacatggctacaccaccacaatgggaatttagctgtgacatggaaatgtattttggatcggaggagaatgcttccattgtgtatgctgccttagcagttgacaaagagttacagcctgataaagtaaaa

SEQ ID NO: 11277 - DNA, 256 bp, Glycine max
  Clone ID: 701064259H1
ctttgttgttgtaactcgttcttcttcttttgttgttctgtgtttgtgtttgtattttctctcacctgaaaatgtcttgctgcggtggtaactgtggttgcggaagctcctgcaagtgcggcaacggctgcagacgctgcaagatgtacccagacttgagctacactgactcaaccaccaccgaaacattcgtgcaacggagtggcacctgttaacgctcaatttgcatggtcctgaaatggaggtgccccctgag

SEQ ID NO: 11278 - DNA, 254 bp, Glycine max
  Clone ID: 701064260H1
cttgaggctagggttaccggattcttgcgttttaatatctgcaattcagaagcatggggcactccaatgtgtggaattctcaccctaagaactacggacctggttctcgcacttgccgtgtgtgtgggaatcctcatggattgatcaggaaatatgggcttatgtgttgcaggcagtgcttccgaagcaatgccaaggaaattggcttcatcaagtatcggtgaaagattagttttccactgcccaaccggttt

SEQ ID NO: 11279 - DNA, 254 bp, Glycine max
  Clone ID: 701064261H1
atccttgttttcttcgttgctacaattttagtagcatggcaatgccatgcgtacgatatgttccctctccgaatgaacactggctatggtgcccgtactccggaggtgaaatactcaagttggaggcttgctgtggaagcactcaacatctttggctttgagagcattcctgaagagtgcgttgaagcaacaaaggaatacatccatggcgaacaatatagatcagactccaaaacagttaaccaacaagctta

SEQ ID NO: 11280 - DNA, 159 bp, Glycine max
  Clone ID: 701064262H1
caaacgttctccgtttagcacagaaacgaacaccgtgattcctctcgccgtagatctgttccatttcgccgttcatccatggccgacgacttggaattagccgacaaagtccctccttcattcgatcgagccggttcaacagggttcaacccatgcttt

SEQ ID NO: 11281 - DNA, 264 bp, Glycine max
  Clone ID: 701064263H1
gtactcaccctcattaccaacacgaaagcatagccaaaaccttttttcgaagtctctgattttcctaatggctccggcaaaggcagagaagaagccggcggagaagaagccagcggcggagaaggcaccggcggagaagaagccgaagggctagaagaagatctcgaaggaaggagggagcgagaagaagaagaagcgcacgaagaagagcgtggagacctacaagatctacatcttcaaggtcctcaagcaggttcaccccga

SEQ ID NO: 11282 - DNA, 247 bp, Glycine max
  Clone ID: 701064264H1
ctgcacgagactccatctccaaaattcttctcatccattccaacaatggatttcagctccaccgtcgacacttctcgtcctttcacctccgtcaaagaagccgtcgccatatttggcgaacgccttctctcggagaaatctatctccataaagagagatcatctggaggctgtcatcacatcccatcaccttcataagaccatgaaaatgatgagagataacacaataaaatggcagttgctgtata

SEQ ID NO: 11283 - DNA, 195 bp, Glycine max
  Clone ID: 701064266H1
ctataagctagtttatcgtgaggagaatatgaagttgtttgttttctttgttgctgcagtagttttggtagcatggccatgccatggcgcaggctaccaaaggttccctctccgaatgaaaactggctatggtgagcgttcttcggaggtaaaatgcgcaagttttaggcttgctgtggaagcacacaacatccg

SEQ ID NO: 11284 - DNA, 266 bp, Glycine max
  unsure at all n locations
  Clone ID: 701064267H1
atcgatcataatgacgctgaatatagaaacccaatctctaacatcgtccgtccactgctccttcgcgccctactgaagattgagtggagaaagagataagagatgggtctggcattgaacatctcagtgtgttctttcccacagcagcgttgctcacatctcttcaaacccaccattaccaaacaagacctctccttccccagcgcttccgcttcgtcctncgtaactcaactcagcgtgggccaggatttacccgccaactacag

SEQ ID NO: 11285 - DNA, 262 bp, Glycine max
  Clone ID: 701064268H1
ctaaaaccttctctctcaacaaaacctacaacaacaacaaaaaaagagaaattttttagaacaatggaggcatcaaagatgaagtttttcttggttttggtgattgccatgttggcgatggtagcaactggggtttcagctgctgaggcacctgccccacgtccttcatccgatgccaccaccttctttgtacccactgctcttgcttctctctttgttcttgcatttggccttctcttctaattaattcttcaacaacctt

SEQ ID NO: 11286 - DNA, 259 bp, Glycine max
  Clone ID: 701064269H1
gttttcttctgggtattgtggtcaacgatcaatgtcatcgccgtgaagaggccgcggagaaggcacacggttgttcaagcattaaaagtaagaccattcaaattagctgttatacgcgatagttgctctatgatctagactataggcttagttagggttttctgttaccgccatggatttcgagagtaggaggcttcatttgctcatctccgtggttgccatcattgctcttagcttcacagctgaaaaatgcagggaa

SEQ ID NO: 11287 - DNA, 257 bp, Glycine max
  Clone ID: 701064270H1
ctcgaccgaacccaaagcagtcactgaggacgtcaagatcgatctcttcgaagacgatgatgagtttgaagagtttgaaatcaatgaagagtgggatgacaaagaggaaggaaaagaagtgactcagcagtgggaggatgattgggatgatgatgatgttagtgatgatttctctctccagctgaaaagggagttggagagcaacactaataagaattaaatcacctgctagttattattgcttgatataacatgtt

SEQ ID NO: 11288 - DNA, 256 bp, Glycine max
  Clone ID: 701064271H1
cagaagagcgtcgcagttgtaaccctaatcagaagaagcgcagcttcaagcgagtgacagccaccagccatgggtcgtatgcacagccgcggtaagggtatatcctcttctgctttgccctacaaaaggacacctcctagctggctcaagatctcttcgcaagatgtcgaagaaaatatctgcaagtttccgaagaaaggtttgaccccgtctcagattggtgtcattctcagagattctcacggtattgctcagg

SEQ ID NO: 11289 - DNA, 250 bp, Glycine max
  Clone ID: 701064272H1
atttctatctcttctatagattcacacttgtgctcactcatctatctattataacctcacactcttcttcatattcttcttcttcttcttgttcttgttctatctgtgacgagcatcatggcctcgagagcagtgctattgttggctatgtgtgtgcttccggccatggttgtggccattcgcccagacaagaaccctttttgcgtgaagggtcgcgtctactgtgacccttgccgtgctggttttgaga

SEQ ID NO: 11290 - DNA, 249 bp, Glycine max
  unsure at all n locations
  Clone ID: 701064274H1
aattgctgccttgttctctgcagcaagtagaactctggacttcttctatggttggtattatgatccggttttctatggtgactatccggagagtatgaaatcttcagtaggatctnggctcccaaaattcacaaaagctgaatctgaaggtctaaaaaattccatagattttcttggtgtgaattactacaccacttattatgcggaacatgctgaacctgtcagtgccaaccgaaccttctacacaga

SEQ ID NO: 11291 - DNA, 227 bp, Glycine max
  Clone ID: 701064275H1
atcaagccagagcacaaagaggggttcctagacaaagttaaggacaagatccatggtgagggcggtgacgccgagggcgagcagaagaagaaggactaggacaatatgctacatggtcatgaaaattgctcatgcaagagtaccagcagttacagtgattgaacttctggatcatctatatcattaaacagtttatggggccatagtactcgtcggctgtggcttaa

SEQ ID NO: 11292 - DNA, 251 bp, Glycine max
  Clone ID: 701064276H1
atcgcagactcaacactctctccagacacttccttcattacaatggcttctcacgacggcatctccgctgcttcttcagattccgttttcaatcacctcgttcgtgctcccgaagatcctatcctcggggtaactgttgcttataacaaagatccaagtccagttaagctcaacttgggagttggtgcttaccgaactgaggaaggaaaacctcttgttttgaatgtagtgaggcgagttgagcagcaact

SEQ ID NO: 11293 - DNA, 251 bp, Glycine max
  Clone ID: 701064277H1
taacacacttaaaacgaccaataatggcgtttgctcacgacttggagttcgaatcgtcttcttcccctctggtgttctcagtacggaggagtgaaccggagctggtggctccggcgaaggccagtccccgcgaaattaaggtcctatctgagatagattctcaggcgggtcttcgtacccaaattccaatcatacagttctaacgtaacgagccatacttggcaggcaaggacccagttcaagccaatcga

SEQ ID NO: 11294 - DNA, 244 bp, Glycine max
  Clone ID: 701064279H1
ctcttcgcgaagagcaacccagtcttccgcgccttcgaacgcgcctccgaacacgacgtcgtcttctggcagatccaccaccagagctccgaacccgactcgcaggtcgaggagcgtgaggcgttctccaggggcagttccgacatttccacggccaccgagttcctcaacaagagggacaaccctctcttcttcgacgaaaagcaatccgccactgtttttcttctggaaacttccacgcccg

SEQ ID NO: 11295 - DNA, 262 bp, Glycine max
  Clone ID: 701064280H1
ctctctttgatacccttttgttctttttggtgctttaatttgcactagcaagggggttggttttatttctgtttgcttgcaacaatggctgtggctaataagttactttctgttttgatcattgccctcattgccatttccatgcttcaaacagtggttatggcatctcatggacatggaggccaccactacaatgacaaggaaaaatatggacctggcagtctcaaaagcttccaatgcccatcacaatgctcaaggaggt

SEQ ID NO: 11296 - DNA, 98 bp, Glycine max
  Clone ID: 701064281H1
atcaacttctgctcttccaactcctacaaagctttttactgcactgatgggcaaggtcaagatcggaatcaacggatttggaagaattggtcgattgg

SEQ ID NO: 11297 - DNA, 146 bp, Glycine max
  Clone ID: 701064282H1
tgacaaggtttccagtttcactcttcaacgactctctcgggtgtcaacttgtgttttgagactctgaggttgaagctgcatttactttaagggtgtggatgggttgtagttgtggatgtggtgccacacatgttctcgggttcggc

SEQ ID NO: 11298 - DNA, 263 bp, Glycine max
  unsure at all n locations
  Clone ID: 701064283H1
caaaagtaaacactgcaatagcaagagttttcaaatggcagagggaaaaggtagagtttgtgtcacgggaggcactgggttccttggttcatggatcatcaagagactccttgaagatggatatgctgttgataccactattagatctgacccaggacgcaagagcgatgttagcttcctcacaaacctacctgacgcatcagcanagctggaaattttcaatgctgatctcagcgaaccaaagagttttggtccagcagttg

SEQ ID NO: 11299 - DNA, 128 bp, Glycine max
  Clone ID: 701064285H1
atgtaagcaaagatggctttcacggaatcgtctctcctggttccttcggtttcaggaaccaacaagggcaagaagacacggtccccgaagacaaatggtatttacgccacattctgtattttaccctg

SEQ ID NO: 11300 - DNA, 254 bp, Glycine max
  Clone ID: 701064286H1
aagttatagaaaaggtgcatctgtaattaggatgctgcaaaaccatcattggtgccgaatgctttcagaggtcgctggcttcatatataaaaagacatgcttgctcaaatgctaagactgaggatctatgggctgcacttgaggaacgatctggtgaacctgtgaacaagttaatggcctcatggacaaagcagaagggatatcctgatgtatctgttaaagtcaatgatcagaaattggagtttaatcagtcg

SEQ ID NO: 11301 - DNA, 186 bp, Glycine max
  Clone ID: 701064287H1
cctcacagcactcatcgattcttttggtgccttatttgtctattcggttgaagttgaataatagaacattccatggctgaagaaatcaaaatggtagaacctggaagaggtaagaggaccccaatcaaaacgcaaggccataaaaagtcaattcagaaagcaaaagtgatgccacaccacatacga

SEQ ID NO: 11302 - DNA, 249 bp, Glycine max
  Clone ID: 701064288H1
cggtttttcagattcaaagcaacaaattgttttccttttctcttcaattcattttcctaagacaaaaaaacaaaccgaaatttcgagcaaaatgagagacattgtttctgtcatggaaaactagttttcctcttcttttggcacgttcattccggcttctccgaacactcgccggcctaacatcccccggaatttcgcttcgcctggtaaaaatcgcgacctctgaacagcaggtttccaaatcgggtg

SEQ ID NO: 11303 - DNA, 251 bp, Glycine max
  Clone ID: 701064289H1
gaaagagactcgtcagagaatatgatccttgcggtgctgtttgccaacgctgagggcaatatcctcatcgaacgttttcatggagttcctgcagaggagcgtctgcactggcgttcattcttagtcaaactaggagctgataatcttaagggtgtcaaaaacgaagagctcctagttgcttgccacaaatcggtttatattgtatacacagtgcttggcgatgtcagcatctatgtcgtgggcaaggatga

SEQ ID NO: 11304 - DNA, 179 bp, Glycine max
  Clone ID: 701064290H1
ttcataaacgcctttcttctccgtttccgtttcctcgttcgaattcgctttttgatctgcgaaaatgagagagtgcatctcgatccacattggtcacgctggtatccaggtcggaaatgcttgctgggagctctagtgcctcgagcacggcatcgggcccgatgggcaaatcccaagtg

SEQ ID NO: 11305 - DNA, 251 bp, Glycine max
  Clone ID: 701064291H1
cataactagaaacagtgtgatgaaaatgaaggtccttgttttcttcgttgctacaattttggtagcatggcaatgccatgcgtacgatatgttccctctccgaatgaacactggctatggtgcccgtactccggaggtgaaatgcgcaagttggaggcttgctgtggaagcacacaacatctttggctttgagaccattcctgaagcatgcgttgaagcaacaaaggactacatccatggcgaacaatata

SEQ ID NO: 11306 - DNA, 186 bp, Glycine max
  Clone ID: 701064292H1
ctgaaagtcggtgtgaaattggtggaaagaaaaaacatcagtgctcttgagtaactaacaatccatccgtgtaaaacgtgattggatttgggtcagtaatttaatgtacgaattacgaggtggcagcgactttaagtgttgaatggtgtgcaacatagaatcgcattggcccgaacacgatgatga

SEQ ID NO: 11307 - DNA, 251 bp, Glycine max
  Clone ID: 701064293H1
ctttgattctctgttctctgttttgttctgtttcgcgtattgtcttcatacaggaacttgaacaatgaagaatgcaaagggcaagggagcagcaagggcctcaaaagaatcactgaagcccgttgatgaccgaaacgttggaaagcggaaggcttccggtaagcctgggagaagtagtgcaccaaagaaggagaagaaggccaagaaagaccccaacaagcctacaagaccacccagtgctttctttgtgt

SEQ ID NO: 11308 - DNA, 256 bp, Glycine max
  Clone ID: 701064294H1
ctaaagaagaatgggcgattaccatttcgtgtacaaggatttagaaggggcttctactcaatgggacgatattcaaagaaagctcggaaatttgcctccaaaggcacccgctttcaagcccccacctttcacccctgcctctgatgatcaacccaaagacaaaacatggatcgattccaaaacctccgacgaactcgaagacctcgtagacaacctcgatgatgatcgcttcctccaagaatacaggtagcagagg

SEQ ID NO: 11309 - DNA, 276 bp, Glycine max
  Clone ID: 701064301H1
cacacacacactgggtctttgcattctgtggaagagcttgttgggttctctcagctttcacctttccaggctcggatccaaagaaaaatctcaactttcttcaacaattcatctccacaatttctgggtagtggctttttttagcaggaatggctcaacgttctaatgttccaatgttaggcaagagtgaagagaatgtttcagatacagctcattctgacaaagcccagaaaggtcagccaggttcaaagatgattaatccaaatgacaccaagg

SEQ ID NO: 11310 - DNA, 258 bp, Glycine max
  Clone ID: 701064302H1
agaccagatgtcttccgaattcgaagttaatttgcaagatggctaaggacaaggctcagatcaacattgtggtggttggtcatgtggacactgaggaggcaaccaccattaacgagctgaagaagcctgttgtggagaaagaagctccagggcatgccatatgagggcatgcacgtacggcctcggaggggaaccagaaaattatgttaacaaaataatctggaaccctaatgtatcagtgtcatcatcagtgtgtag

SEQ ID NO: 11311 - DNA, 268 bp, Glycine max
  Clone ID: 701064303H1
ggatcctttcaatcttcatcagctttgcttgaacctggatacatattaaagcatgactcttcagcaatgcctaaaacttctattattgacactacagtgtcttcctggtcaaacaactatctgcagaaaaccaccaacgtattgcatgggcaaaaacaaaaagtgaataattgttgcagtagcagtgaaagtccaagagcacagttggttggtgaatctaatggtcgagggaataatagccatccattgagagttcttccggattttg

SEQ ID NO: 11312 - DNA, 269 bp, Glycine max
  Clone ID: 701064304H1
tagaaacagtgtgatgaaaatgaaggtccttgttttcttcgttgctacaattttcgtagcatggcaatgccatgcggtacgatatgttccctctccgaatgaacactggctatggtgcccgtactccggaggtgaaatgcgcaagttggaggcttgctgtggacagcacacaacatctttggctttgagaccattcctgaagagtgcgttgaagcaacaaaggaatacatccatggcgaacaatatagatcagactccaaaacagttaa

SEQ ID NO: 11313 - DNA, 270 bp, Glycine max
  Clone ID: 701064305H1
ctctcacacactcactctctttctctctcctattgcggctagggtttgggtttttcactttcagcctcctcaattctttcaaccttcttcttctctttgatctctgatggagacgttccgtgtttagtagcaagggttagttgaggccttgtgtttggaaacgtacggtgtcgttttggagttgggaaaacaaataattctgagagatggcaaccacgaacccttttgatttgttgggtgacgacgctgaggacccttctcagctcatcg

SEQ ID NO: 11314 - DNA, 266 bp, Glycine max
  Clone ID: 701064306H1
caggaatgctggcatttggagaatagctgctatcaatgaagctggagggtggaaagacagaacaacagtggagatatggaccttgctgttcgtgctagtcttaggggatggaaatttttgtaccttggagacctccaggccaaaagtgagcttcctagtactttgagagccttcagattccagcagcacagatggtcttgtggtcctgctaatttgttccgcaaaatggtgatggagattgtgaggaacaagaaagttaagttttg

SEQ ID NO: 11315 - DNA, 268 bp, Glycine max
  Clone ID: 701064307H1
ctataagctagtttatcgtgaggagaatatgaagttgtttgtcttctttgttgctgcagtagttctcgtagcatggccatgccatggcgcaggctaccaaaggttccctctccgaatgacaactggctatggtgagcgttcttcggaggtaaaatgcgcaagttttaggcttgctgtggaagcacacaacatccgagcctttaaaaccattcctgaagagtgcgttgaaccaacaaaggactacattaatggcgaacaatttagatca

SEQ ID NO: 11316 - DNA, 266 bp, Glycine max
  Clone ID: 701064308H1
caggttcaaattgtcgatgtgttcaagatgttatggctgtgaacactgcacagaaacagtgttgcaatcttggcgagattagcaaaagggttgttgtggttcccgatcttgattcaattgaactgtaaaacactctagacaaatatgactaatgcaccacatacagggatagtacagtaccttgttggcttatgtgaatatatgtgactaaaaagacacggacaattggcaagtgccaattggatactagacctagcatttgatat

SEQ ID NO: 11317 - DNA, 271 bp, Glycine max
  Clone ID: 701064309H1
cagcaatgaaagcaataagtccctccttcctctgccttataattcttgtgacccttttacgctggtagcattgaaagtgtcacagcaaacgtgaagccaagccattatgctgcacccttcaataggagtgtttttccttctggttttctatttggaataggctctgcagcttaccagatagaaggagcagcagctatagatggcagaggaccaagtatatgggacacctatactaaacagcaaccagggaagatttgggatcatagtgatg

SEQ ID NO: 11318 - DNA, 271 bp, Glycine max
  Clone ID: 701064310H1
cttgctactgagtttccacactgcataccttacgtcttccgaattcgaagttaatttgcaagatggctaaggaaaaggctcagatcaacattgtcgtggttggtcatgtggaccctgaggaggcaaccaccattaacgagctgaagaagcctgttgtggagaaagaagctccagggcatgccatatgagggcatgcacgtacggcctcggaggggaaccagaaaattatgttaacaaaataatctggaacgctaatgtatcagtgtcatca

SEQ ID NO: 11319 - DNA, 270 bp, Glycine max
  Clone ID: 701064311H1
ctttaatcaacacaaaaaaattatcatctgcagtttcagggaaataaaacaaattgggattttgttttcatttgtaatattgttctttggcgtgatctcctgtctcatacttctgttcacattggctttgccactttttaaacccttcctggttttatgatgctttagttgtgatacaatataaaggtgtgatgtttatagctttggggtcatattatgggagctctctactatgcagcaaccatggggaggaatgaatccgatgcaagt

SEQ ID NO: 11320 - DNA, 272 bp, Glycine max
  unsure at all n locations
  Clone ID: 701064312H1
ggagtcgcctcgtgtttccgtttccgtttcaatttcctctcacaggctttaacattancagctcgagataagacatggaccggatgaaaggcccatggagtccggaggaggacgaggctctgcagaagctggtggagaaacacgggcccaggaactggtctctgatcagcaagtccatcccgggccggtccggcaagtcctgcaggctccggtggtgcaaccagctgtccccccaggtggagcaccgggccttcacggccgaagaggacgac

SEQ ID NO: 11321 - DNA, 278 bp, Glycine max
  Clone ID: 701064313H1
aaagcaatgaaaaggagtctccgtaagtcaaccgaagccatggacgcaccagctggtataattgagcagccgtcaaagaagaaaagagatccgcgccatctttatcgcaatcgcgtttaagccaaaaataaaaatgaaaaggaattcctattcttattctcattctcggcgttaatattttccctccatccctggcgcgattcattttctctttggaataagagaacagaaccgaacctgcaaagggttggttccattccaacatgtagagcacgctc

SEQ ID NO: 11322 - DNA, 280 bp, Glycine max
  Clone ID: 701064314H1
cgatgaggttgatgagagtggatacaacagctgcagctcaagcaacagcatcaagaactaccaagatggaaactccaagattgacttgacttcaccaggcaaaaggtacttcttgtgccccatttcaggccactgtgctggaggcatgaagctgcaaattaatgtggctgctgctagtgggacccccccaacaaccccaagtggcaccccaccaaccaccccatcaaacccttctccttctcctccctctgagtcaggatccaccaacaccacttcacca

SEQ ID NO: 11323 - DNA, 280 bp, Glycine max
  Clone ID: 701064315H1
ttgcaaagaaaatacacattacattactaagtctttgttcatttgagtagtagtgatggctagcctcaaggttgcatgtgtggttgctgtgatgtgcatggttgtggtggccatgagtgctgcacccatggcacaggccgcaatcacgtgcgggcaggtcgccggcgacatgtctccgtgcttcagttatcttcgaagcggcggaaaaccgtcgcaggcctgctgcaacggagtgaagtccctcagcagcgcggcgaagaccaccgcggaccgccagggg

SEQ ID NO: 11324 - DNA, 283 bp, Glycine max
  Clone ID: 701064316H1
aagatagagcagaatcatctgaattgcagtcattttctgattctctgcggtccagacttaatgcggtgtccatgagatacaaagagtcaatctcaaagggcactaggggatggaaggagaggctgttctcgcatagttcttccatgtcagaacttggttcagaaacaaggaggagagagatgaaagctggaattgctagtgtatcccgattgatggaatcccttgaaactagtgaaaataatagagctgtgggtacttctttgtcaaatcaaaatcatataga

SEQ ID NO: 11325 - DNA, 268 bp, Glycine max
  Clone ID: 701064317H1
atccctctcgcgcgctctctctcccatggaatcctccgctgccattcgatcttttcactatcccataggcactatgtcccatgtgcgagcctcccttgagaagcaggctgtagttcccattcataatgccggatggaactctaaaagtaggcttttcatccagcatttggcatatggtcagaagcacattaattcccacacgaaggggaaaaacacactaatttcatgtggaaaaacagctgaagctatcaacgcatccaaatctgat

SEQ ID NO: 11326 - DNA, 268 bp, Glycine max
  Clone ID: 701064319H1
atttgatcagaagtacaaagctcttcaaaacccaaacatcagctccactgaccacccctactgctctgctctgcaatggccgacgaggaacctgttgatcagaagagatatcttgaagagtcttgcaaaccaaaatgtgtaaaaccattactggaataccaggcgtgcattaaaaggatacatggtgatgattctgggcagaaacactgcactggacaatattttgattattggtcttgtattgacaaatgtgttgcaccgaagctat

SEQ ID NO: 11327 - DNA, 264 bp, Glycine max
  Clone ID: 701064321H1
ctcagtgaaagagaatccgaggcgaagagaagagaaaaattaagatggaggggaaggagcaggatgtgtcgctgggagcgaacaagttcccggagagacagccgattgggacggcggcgcagagccaagacgacggcaaggactaccaggagccggcgccggcgccactggttgacccgacggagtttacgtcatggtccttttacagagcagggatagcagagtttgtggccacttttctgtttctatacatcactgtcttaa

SEQ ID NO: 11328 - DNA, 269 bp, Glycine max
  Clone ID: 701064322H1
ctaacgcactctcaactcttcacttgttaatgcttcctcctgaaagttctaaactcaacgcaatggagctttagcaaagtcacgttagagatcttttcaaaattggagcagcaatggctctcgcactacgaagcatcaaccaaaacgcgcattctcagcattgacggcggaggaaccaccgccattgtcgccggcgcctccctcgtccacctcgaagaccagatccgcgcccaaacctccgatcctcacacgcaaatcgccgattactt

SEQ ID NO: 11329 - DNA, 266 bp, Glycine max
  Clone ID: 701064323H1
gttttagcccagcccactcaataaggggcttaacaatcatgcattcgttgcttcgttcgtgaattaggcacaatttcctgactcatttgttgaccaattctaattcctaactaatcgatttctctgcttctactcagtagttcgttcaattcaccggtttgttcaactcaaatcgtgcaatccttctttcaagctcgcgatttcctcttctggaattctcaagatcttgataatggcaaccactgcctgtttcatcattgttagca

SEQ ID NO: 11330 - DNA, 265 bp, Glycine max
  unsure at all n locations
  Clone ID: 701064324H1
gccttcaaatcacacactctcttcaatttctagggttttgctattgctttgcctccgttccccctttctcagcaaaaaaacgctttttctcttctccttcgtatctattctttgcgtttggtttttggttgattgaaggcattcacagcgtaattcgttgctgnatttcaatcgatttatctaaccaggactgagtgagctaatggagtctaaaggtgggaaatagaagtctagtagtagtagtagtaaatcaattttttacgaa

SEQ ID NO: 11331 - DNA, 265 bp, Glycine max
  Clone ID: 701064325H1
catggtctacccggagccttggtgtatgccacgactttttacggctggtatagctgaattctatgagggatattacgcaaataagggtgtaaatatcattaaaggaactgttgctgttggattcacttctaattctgatggagaggtaaaagaagtcaaactaaaggatggcagggtcctggaagctgatattgttgttgttggtgttggaggaaggcctcaaacagtcttagtcaaagggcaggttgaagaggagaagggtgga

SEQ ID NO: 11332 - DNA, 265 bp, Glycine max
  Clone ID: 701064326H1
tgcagcagtgcagggaagttggtgtgtgtcaccggtgctgccggttatattgcttcatggattgtcaagttcctacttgaacgtggttacactgtcagggccactgttcgaaacccaaatgatcacacgaaggtagaacatttgctaaaacttgaaggtgcaaaggagagactgcacctttttaaggcagatcttttgggtgaaaattcttttgactccattgttgagggctgtgatggcgtctttcatactgcttctcctttta

SEQ ID NO: 11333 - DNA, 263 bp, Glycine max
  Clone ID: 701064327H1
ggcactgtggcagaagtcctaggagtgttgaacagagatgctaaatgaagacgatcttgacgtctgagaccatgaatattcccgacggcgtgcagcatcaaggttcacgctaaggttatcgaggttgatggccctcgtggaaaactcgtgcgagacttccagcatctgaacttggacttccaacttattaccgacgatggcggtacaaggtagctcaagattgattcttcgtttggttctcgtacaacctccgccgccatccg

SEQ ID NO: 11334 - DNA, 273 bp, Glycine max
  Clone ID: 701064328H1
attgaattgacaatgaggcctgctcttgctttgcttcctcttctatttgctttcttgttagctgccactacggaatcaagaaaagatccatgggaatattggaaaatgatcatgaaagatcaggaaatgccagaaggacttcaaggtcttgtttcatttcaatctgaaaataaccctaagactcaagagcagcttggtaaaggttccaaaaaccattgtgaagagtctctagttacaaatacacaagttaacagtgacttcgaacccatacca

SEQ ID NO: 11335 - DNA, 274 bp, Glycine max
  Clone ID: 701064329H1
cctggctggtgctttggaggatgttgttaaggcatctcagcttgagatcatcgagctgaagcatactgtgggtgaattaagggcagagttgagcttacttaagcagcatgtagaagctcaggccaaggagcttgaccatagaatgcatcgggtagaggaacttgaagagaaggagagagtggcaaatgaaaatattgagggactaatgatggacattgctgccgctgaagaagaaattaacagatggaaagtcgcagcagagcaagaagctgct

SEQ ID NO: 11336 - DNA, 275 bp, Glycine max
  Clone ID: 701064330H1
gtccgctgcgactctctttccttccctctttttccgaatctgaatcgaaatggcttcggagactgagacgtttgcttttcaggccgagatcaaccagctcctcagtctaatcatcaacaccttctacagcaacaaggagatctttcttcgtgagctcatcagcaatgcctctgatgctttggacaagattcgatttgagagtcttacagacaagagcaagcttgatgctcagccagagttgttcattcacattattcctgacaagaccaacaaca

SEQ ID NO: 11337 - DNA, 278 bp, Glycine max
  Clone ID: 701064331H1
gtggagctcaattagcatatggttctaacccatatcagccaggccaaataactgggccaccggggtctgttgtgacatcagttgggaccattcaatccaccggtcaacctgctggagctcagcttggacagcatcaacttgcttatcagcatattcatcagcaacaacagcaccagcttcagcaacagctacaacaattttggtcaagccagtaccaagacattgagaaggttactgattttaagaaccacagtcttcccctggcaaggatcaagaag

SEQ ID NO: 11338 - DNA, 280 bp, Glycine max
  Clone ID: 701064332H1
aatgaaatgaaaaaaggtcgttggagtctactcctgatcccattagaataaaaaggtgttggaatagagggaagaacgtggaaagtggttgacgaagaagacgaagaagaagaatggagaagtcagggaagagagtgttgcttacctccaacggcgacgacatttctcaaggcattgccttccatttggtgaagcaagggtgcaggttggttttgctgggagatcagaattccctgcggagcatcgcgaacaaaatcatggattccctctccctcgcaga

SEQ ID NO: 11339 - DNA, 89 bp, Glycine max
  Clone ID: 701064333H1
attactgtcatgccatggtataatcatgctcaagttcttgagaaattattggatttcctgtactcagaaatacagagtgagaacctatc

SEQ ID NO: 11340 - DNA, 265 bp, Glycine max
  Clone ID: 701064334H1
ctctgctcgtgcctctagggttatcatatctccatttccatttcctctctctcagtttccaagaatcttaagctactgggaaagtcttacccaaccgtgagcgctgattaccagaaggccgttgagaaggcgaagaagaagctcagaggcttcatcgctgagaagagatgcgctcctctaatgctccgtttggcatggcactctgctggaacttacgacgtgagctcgaagaccggtggtcccttcggaaccataaagcacccct

SEQ ID NO: 11341 - DNA, 261 bp, Glycine max
  Clone ID: 701064335H1
tttccaactttccttcttcttcttccttccttcctcgtttcgttaaccttctaattcaattcattcctcacttccttttcctccgaaccttttcttcgataatcagagagagataataatggattggggaaacgtaaccgcggaggatctgatcgacgcgctccgtgaggtggattggtcgtcgccgccgcgccctctgtcggaattcttctcgcgattcaccgttcccaggtcttcctccaaatggaacagccgcctcaa

SEQ ID NO: 11342 - DNA, 262 bp, Glycine max
  Clone ID: 701064336H1
tgaaccttccactgtggtgactctgcgatgggtgcctacaagtatgtttcagagctatggcgccagaacgagtctgatgtcatgcgcttcttgcagcgggtgaggtgctgggagtataggcagcaaccttccattgttcgtttgacaaggtctacccgccctgacaaggctcgtcgcttgggcttcaaggctaagcagggctatgtgatttaccgtgttcgtgttaggaggggtggccgaaagagaccagttcccaaaggta

SEQ ID NO: 11343 - DNA, 264 bp, Glycine max
  Clone ID: 701064337H1
aagaaactagacaagagagtttctgatcaccaaacagatgatgagttccttgaattgataaacagtatttgacagaattccggcatccaaatattgttgagcttattgggtactgtgcagagcatggtcaaaggcttctgatttatgagtattgcagtaatgggtcgctgcaggatgcactccattcacatgatgaattcaaaacaagactgtcatggaatgctcgcattcggatagcactcggggcagctagatccttagagt

SEQ ID NO: 11344 - DNA, 263 bp, Glycine max
  Clone ID: 701064338H1
gttgtctgggggtcaaaaaactgttgtcgcccttacacttatctttgccatacagcgatgtgatcctgctcccttttatctatttgatgagatcgatgcagcgcctggatccacagtacagaactgctgttggaaatatgattcgtcgcttggctgacatagcaaacactcaatttatcacaacaacattccgcccggagctagtgaaagttgctgataagatatacggagtaacacataaaaacagggtcagccgtgttaat

SEQ ID NO: 11345 - DNA, 261 bp, Glycine max
  Clone ID: 701064339H1
tggacttactggagttatgggcaattttcggccccggcgtcgccggcgctgtcttcggcgccggatggtggatctggcttgacgcggtcgtctgcagcttggtcaccgttcccttccttcactaccttcccggaattttcgcatcttttgcggctttgatgttcaattgcgttagaaaagaagacatcgattattctccatatgacgaaggcgagtcgagactgacgccgtcgctcttcattgcatatgtcgtatcctttg

SEQ ID NO: 11346 - DNA, 260 bp, Glycine max
  Clone ID: 701064340H1
gtttgttgatccatctcttgtttcttgctttctttcttcaccatgtcacttgctgggaaaatcaccactgaaatcggggttcatgcaaccgctacaaagtggttcaacctcttcgcaacacaactccatcatgttcaaaacctaactgatagagtgcatggaaccaagctgcatcaaggtgaagactggcatcacaacgagacagtcaagcactggacttataccatagatggtaaggttacaacatgtctggagagtat

SEQ ID NO: 11347 - DNA, 264 bp, Glycine max
  Clone ID: 701064341H1
ccactatcttaattgcctctagttctctcactttaactattttcacaaaccatagaaaaataataatttttctttttcattgtaacatgtcttcctcagagggtgtctttgaacagggaattgagttctcagaagccaacaatgttcttctcatgtctctaatggaagaagaacaagaagaagagtactatggcgatgatagacttgtgagcatgattcaatcattggaggcagagatcactgacactgaaatgggtcaaatgt

SEQ ID NO: 11348 - DNA, 263 bp, Glycine max
  Clone ID: 701064342H1
tattcgtgagagcttattcaatcaaaatgtctcccaaatacaagctagtgctgttgatagcattggtttttggttgcacactcccttgctggtcgcacaaaggaacatcctaagcatcctccatcccttcaagaacaacaacacaccccacaccttgatagctacccgccaaagcatagaccgagaccacctcatcctgtacatggtgccggggaggaaccaacctccattcctcgaaagaagggaccaagaaggcctccgaa

SEQ ID NO: 11349 - DNA, 265 bp, Glycine max
  Clone ID: 701064343H1
ttaagcttgctactgagtttccacactgcataccttatgtcttccgaattcgaagttaatttgcaagatggctaaggaaaaggctcagatcaacattgtcgtggttggtcatgtggaccctgaggaggcaaccaccattaacgagctgaagaagcctgttgtggagaaagaagctccagggcatgccatatgagggcatgcacgtacggcctcggaggggaaccagaaaattatgttaacaaaataatctggaaccctaatgtat

SEQ ID NO: 11350 - DNA, 274 bp, Glycine max
  Clone ID: 701064344H1
ctctcgctcgagcacagccattgtttacttttcattgattgagccaaagctttgtatcttctgcgataattttccattcggtggacgactctctcaacctttattcgaaagagcaaggatctgagttgagttgagtgatcatgtgtggtggtgcgattatctccgacttcataccggcaggtcccgccagcggggcgcggcgcgttaccgccgacatcctgtggccgagtttgaggaagagcttctcgaagccgctgctggacgatgatttcga

SEQ ID NO: 11351 - DNA, 267 bp, Glycine max
  Clone ID: 701064345H1
gttcgttccacgttgttgttcgctctgtgtctctcactctctctatatttgcatcattcatcggaaatggctctcgaggttgctgttaaggctgctgttggggctccaaatgttctcggagattgtccattttcccaaagggtcctcttaactttggaggagaagaaaatcccttacaaactccacctcatcgatctcagtaacaaacccgaatggtttttgggtgtgaatcctgaagggaaggtgccagtggttctttttgatggc

SEQ ID NO: 11352 - DNA, 192 bp, Glycine max
  Clone ID: 701064346H1
ataaaagaataagtttgaaactttgattgaattgattgtctcaattcaggactaatttttgctcggagtaaacaagattatcagatgtgattacaaaaaaggaaacaaaacacacggaagacagaaaaccgtatttgttctcactttcaattgtatacgagcagaaaccgcaattcatattgttctctgtcc

SEQ ID NO: 11353 - DNA, 258 bp, Glycine max
  Clone ID: 701064349H1
gttggactgcacggggcttctccatctcacatccctgcaacaattaaccatagagagatgtcctttgctggaaaatatggtgggagaaaggcttcctgactctctaataaaattaaccatatgggaatgtcctttgctggaaaaacgatgccgcatgaagcaccctcaaatttggcctaaaatttgccacatccctggcattaaagttgacgatagatggatttagccaccaaggatgattcacagagaatccacaaa

SEQ ID NO: 11354 - DNA, 255 bp, Glycine max
  unsure at all n locations
  Clone ID: 701064350H1
attttacacacacaaaaagaaacacaatntcaaactcttnnctnncaatatgttttcttttngtaatatacacaatttcaacctcatcccgaccttatgaaaactatgatgacaagtcatccctttcctccacaataagtgaacaacacttctctctccaagtcccaacattagatgaaacaacctttgataatctcctatcctttggttactaccgtaaaacctgtccccaattcgaatccatcccacacaaca

SEQ ID NO: 11355 - DNA, 258 bp, Glycine max
  Clone ID: 701064351H1
cgttggtataaattattacacctcaaatttcgtggaatatgctccaccaaccaccactaacaagacctatttccatgatatgctagccaaactttcttcgaccaggaatggtgtacccattggcacaccgactcctctgagctggctctttatctatccggagggaatttataagctcatgacatacataagggacaactacaataatccaccagtgtacattaccgaaaatggcgttgcggaatcaaagaatgactc

SEQ ID NO: 11356 - DNA, 258 bp, Glycine max
  Clone ID: 701064353H1
gctagacataataagatgaaaatgaaagtgcttgttttgtttgttgctacagttttggtagcatatgaatgccatggctcagactaccagaagttccctctccaaatgacaactgggtttggtgggcaatacagcaatgaggtggcatgtgccagttggaggcttggcgtggaagcaaacaacgtagtcaagtggcaaactcttcctgcagcttgcggagagtacatagctgactacgttctaggagaccaatataga

SEQ ID NO: 11357 - DNA, 256 bp, Glycine max
  Clone ID: 701064354H1
agtttgttgtgagctataagctagtttatcgtgaggagaatatgaagttgtttgtcttctttgttgctgcagtagttttggtagcatggccatgccatggcgcaggctaccaaaggttccctctccgaatgaaaactggctatggtgagcgttcttcggaggtaaaatgcgcaagttttaggcttgctgtggaagcacacaacatccgagactttaaaaccattcctgaagagtgcgttgaaccaacaaaggacta

SEQ ID NO: 11358 - DNA, 258 bp, Glycine max
  Clone ID: 701064355H1
cacacatagtagctattatactctctagagtaattgcggaatctgctagaattttctaataatggcgaaagaccgtgagcaagtcacagagcaacgtgaatactccgcgaaggactaccatgaccctcctccggcaccgttgatcgacccagatgagctcacaaagtggtccttgtacagagccgccatagctgagttcatagcaacactcctttttctttacatcaccgtgttgaccattattggctacaagagaca

SEQ ID NO: 11359 - DNA, 258 bp, Glycine max
  unsure at all n locations
  Clone ID: 701064356H1
cttttctttcacctcttcttgtgtcttatttctacctattccaatttccagccaccatgtctggtcgaatgcataccgaatcccgcgtcatcgtcacgatccgnacgcgcctctgatcagcgtcatcagcagccggcggcggctcctctgagccggtacgaatcgcagaaacggcgagactggaacacctttggccagtacttgaagaaccagacacccccagtttcgctttcacagtgcaacttcaaccacgtgctt

SEQ ID NO: 11360 - DNA, 250 bp, Glycine max
  Clone ID: 701064357H1
gtcgtcgctgtttgtgtgtgtatcaggtgcagctaccaacgatggtgaaaggtcgtcaaggagagcgcgtcagactctacgtgaagggtacaatccttggatacaaaaggtccaagtccaaccagtacccaaacacatccctgatccaaattgagggagtgaacaccaaagaagaagtaggatggtatgctggcaagacaatggcctatatctacaaggctaaggtgaaaaagggtggaacccattaccg

SEQ ID NO: 11361 - DNA, 256 bp, Glycine max
  Clone ID: 701064358H1
gtagaagaagggaagatgaactccccatggatggaagcggtgctgacgctgggaatcatatcgggaatgctctgcgtcatgggaaacgctcagtattacattcacaaatccgcgcatggcagacctaagcacatcgggaacgtcatctgggacgtggccatggaacgaagggacaagaagcttgtcgagcaagcctctccctccaattaacatcggtgtgttgccaatgacattgtgaagaaaataaactgctcac

SEQ ID NO: 11362 - DNA, 262 bp, Glycine max
  Clone ID: 701064360H1
tgctgtttcagccagagttagcattgaggcaggatcaacatttgggtgggagaaaattgttggagcaaaaggacaagcaataggcattgatcgttttggagctagtgctccagctggaagaatatacaaagaatttggtatcactaaggaagctgttgttgctgcagctaaagagcttatctagaacttttgattttttttgccttctggtgttggttgagagcattccatgtcatgaataagaaaaaggttaaatatcctt

SEQ ID NO: 11363 - DNA, 264 bp, Glycine max
  Clone ID: 701064361H1
catttactgccaatgggtgggtgcaatcatatggatcccgctgtgtcaaacctcccatcatctatggtgatgtgagccgtcccaagcccatgacagttttctggtcttcaactgctcaaagtttgaccaaacgaccaatgaagggaatgcttactggccctgttactattctgaactggtcctttgttagagatgaccaaccaagatttgaaacatgttaccagattgctttggctatcaaggatgaggttgaggatcttgaga

SEQ ID NO: 11364 - DNA, 264 bp, Glycine max
  Clone ID: 701064362H1
gtgtttctttctctgtctagtcctagatctctctctccaatggctggtttcttctctcttctaagacgcctctatctctccctttacaattggaccgttttgtttggatggtgtcaagttctgtattttgtcctcaagacattgaacgaatcgggtcatcaatatgtttacaatgcagcagaaaagcctttgctttatgctcaaaccgctgctgtgttagagattcttcatggcttggtaggattggtgaggtctccagtaaca

SEQ ID NO: 11365 - DNA, 267 bp, Glycine max
  Clone ID: 701064363H1
ctgaactggatccagagagtgtttctaaacgacgccgtgtcgcaagcatcagtagtgtagtcgcagagaatccgatcaatagagaagggagagggattgatgggatccggaggacgaagatggggcgttgacgtctccgacaattgcacttctcgcgatattcccgatgctcccggattctgtcgcaattctctcgatcaggacgatacaacgctcagtcgccagaagaaggacgctgaatccaagtggcaagcccaggaagcttgg

SEQ ID NO: 11366 - DNA, 283 bp, Glycine max
  Clone ID: 701064364H1
atatgaactgaactcaggtagatcttgaatcagtaggttatattagttaagatgaacctgaacacgtgcagtgacttggatactcggtctctgcttgatgagctttgtaactttaataagaagggactcttagaccttggagactctcttctcaatcgaatctttgagagcttggacaaagctgctggaataggagcggttcaagctgtgtctcgtgaggcttatttcacagccattgacggtaccggggctgataatagtggaggtttgccaccagaaattt

SEQ ID NO: 11367 - DNA, 245 bp, Glycine max
  Clone ID: 701064365H1
gtttgttgtgagctataagctagtttatcgtgaggagaatatgaagttgtttgttttctttgttgctgcagtagttttggtagcatagccatgccatggcgcaggctatcaaaggttccctctccgaatgaaaactgggtatggtgagcgttcttcggaggtaaaatgcgcaagttttaggcttgctgtggaagcacacaacatccgagcccttaaaaccattcctgaagagtgcgttgaaccaa

SEQ ID NO: 11368 - DNA, 257 bp, Glycine max
  Clone ID: 701064366H1
catgccattccgtgctctccttgatgttggtcttattaggactacaaccggtaaccgtgtgtttggtgcccttaagggagctctggatggggggttggatattcctcacagtgacaagaggtttgctgggtttgataaggagaagaaggagcttgatgcagaggttcatcggaaatatgtttttggtggacatgttgctgcctatatgaagatcttggcggaagatgaaccagagaaataccagtcacacttcagtg

SEQ ID NO: 11369 - DNA, 255 bp, Glycine max
  Clone ID: 701064367H1
ctgacatagagaagaagaagagagagtgatggagtgcgtattcggattggtgggtaatgggtttgcgatcgtggtggctgattcatcggcggtgcacagcatcctcgtccacaagtccaacgaggacaagatcatgctcctcgattcccacaaactcattgccgctagcggcgagcccggagacagggttcagttcacagagtacattcagaagaacgtcgccttgtatcagttccgtaacggcatccctcttac

SEQ ID NO: 11370 - DNA, 252 bp, Glycine max
  Clone ID: 701064368H1
gaataatcgagacacagatcatagtgatcattttttaatttctcagatttatccgacgtcgctgcagatccaccaaccgttatggctgccttcagcggtgatgaaacggcaccgtttttcggcttccttggcgccgcagctgccctcgtcttctcctgtatgggagctgcctatggcacagcgaagagtggcgtgggcgtggcttccatgggtgtaatgagacctgagctggtgatgaagtcgattgttcct

SEQ ID NO: 11371 - DNA, 253 bp, Glycine max
  Clone ID: 701064369H1
atacactctgctcgtagggtttctccacctagagggaaatggctcccaaaccgcctagtacgggtctgtttgttggactgaacaagggtcacgtcgtcaccaagaaggaattgcctccacgcccctcagatcgtaatgggaaaacaagcaagacggtgcactttgtgaggcacctcataagagaggtagccggttttgcaccctatgaaaagcgtataactgagttgctgaaggttgggaaggataagagggc

SEQ ID NO: 11372 - DNA, 254 bp, Glycine max
  Clone ID: 701064370H1
atgcgttgcccccaataacaaaagtggaaaattgaagaaaggattccaacaattggacatttcgactcaaacataaacagaagataaaaactcgtctgttacctactctgcgatatcgcagctttcactcttcgccgtccccttgcaggtgcagagcttcaataacgtaactgccactcatatcgttaattgaatgagtattgttgcgttacgtgcaagcgtctcctatttctcccgtccatggacagaagaat

SEQ ID NO: 11373 - DNA, 254 bp, Glycine max
  Clone ID: 701064371H1
catatctccatttccatttcctctctctcagtttccaagaatcttaagctatgggaaagtcttacccaaccgtgaaggctgattaccagaaggccgttgagaaggcgaagaagaagctcagaggcttcatcgctgagaagagatgcgctcctctaatgctccgtttggcatggcactctgctggaacttacgacgtgagctcgaagaccggtggtcccctcggaaccataaagcacccctccgaactcgctcac

SEQ ID NO: 11374 - DNA, 254 bp, Glycine max
  Clone ID: 701064372H1
gcaaaaggccatataatttttttttatttgaaataatgtccgggatcatccacaagattgaggagaccctccatgtgggagggcacaagaaagaggagcacaaaggagaacaccatggtgagcacaaaggtgaacacaaaggagaacaccatggtgagcacaaaggtgaacacaaaggagaacaacaccatggggagcacaaggagggacttgtggataagatcaaggacaagatccatggtgatggccatgac

SEQ ID NO: 11375 - DNA, 254 bp, Glycine max
  Clone ID: 701064373H1
ttcggtttttctggaaatttttcttctctcagccatctctctctctctctgcgtccatggagttttgggcgtgtgaggtgaaaagtggagaatctctcaaggttgatccgggagatgacaagattatccacctttcaaatgcatgcctgggggatgtcactaaggataaagaaggtctaccagtagccctgtatgtcaagtttggtaaccaaaagcttgtacttggaacgctttcttctgaagcttttcctcag

SEQ ID NO: 11376 - DNA, 252 bp, Glycine max
  Clone ID: 701064374H1
gtttctctctctagcttggacgagtgaattagattcatcatcaagatgtcgtctctgatagcagaagatgtgaagagcagatcagaggtgtaccacggggacgaaatgtgccaagtgaagtccaaggagcttctcaaggaaatcgccctccccaacggccttcttcccctcaaggacatggaggagtgcggctacgacagacaaaccggcttcgtctggctcaaacaaaagaagagttacacccacaagttc

SEQ ID NO: 11377 - DNA, 261 bp, Glycine max
  Clone ID: 701064375H1
caaagaagtgaaaataacagcaaaaagtagcagctgctgcagctcccccgaagcttatctcagcagcagatactcaaccctgtttgagtagccgagaataacaccacatgggagaggatgaaaagaaaccagaggaacaacccaaggcagaggagaaaaaaccagaggtagagaagaagaaagaagaagcagcagcagcggaaaaaccaagcgaagagaaaaaaccggaacaagagtcgaaagaggaagttcccgctccgc

SEQ ID NO: 11378 - DNA, 260 bp, Glycine max
  Clone ID: 701064376H1
gttcatgaatatgtctccttgtattacccaacagatgcagcagttcaacaagatactgaactacaagcatggtggaaggaagctgtggagaagggtcatggtgacttaaaagaaaagccttggtggcctaaaatgcagacaactgaagatctcattcaatcatgctctattatcgtttggacagcttcggctctccatgctgctgttaattttggacaatatccttatgggggcttaatcctgaaccgtccaactctagc

SEQ ID NO: 11379 - DNA, 263 bp, Glycine max
  Clone ID: 701064377H1
gctcgacctagaactgtgttagggttttacgaaaccaccgaagttgcagaaaaaggaagaaagaagaaaaaatggtggctgacaggagcaagaagccgaaggtctccgagaagggcgaaaacctcgatgaaatcgacggagaactcgtcctctctatcgaaaagttgcaggagatccaagacgagctcgaaaagatcaatgaggaagccagtgacaaagtgctcgaaatagagcagaagtacaatgagatacggaagcccgtc

SEQ ID NO: 11380 - DNA, 276 bp, Glycine max
  Clone ID: 701064378H1
taattgcaagactggcacttcgttgcttggtgatgtccctttctgttctcttcactcttggtcttgcgagagaaagccatgccagagacgaagatttttggcatgctgtttggccaaacactcccattccaagttcattgcgagatcttctaaagcctggccctgcaagtgttgaaatcgatgatcaccctatgcaaattgaagaaacacagtacccgaaaaccttcttctataaagaagaccttcatccaggcaaaacaatgaaagtacaattca

SEQ ID NO: 11381 - DNA, 263 bp, Glycine max
  Clone ID: 701064379H1
ggccattccgtgctctccttgatgttggtcttattaggactacaaccggtaaccgtgtgtttggtgcccttaagggagctctggatggggggttggatattcctcacagtgacaagaggtttgctgggtttgataaggagaagaaggagcttgatgcagaggttcatcggaaatatgtttttggtggacatgttgctgcctatatgaagatcttggcggaagatgaaccagagaaataccagtcacacttcagtgaatacatc

SEQ ID NO: 11382 - DNA, 258 bp, Glycine max
  unsure at all n locations
  Clone ID: 701064380H1
cgttttgtttatttgatcttaacaactagcaaagatgtttggaatcatcggaggaaacaagggtcacaagatagaggggaacttggtgattatgcgaaacaatgtgttccatatcaacagcattaccagtgttaatggtgtcatcggaaccggcattaatcttcattggaggagtcgtcgacaccgttactgctttggcgtcccacatctccatccagctacctcantcccaccaaggctgattcacatgggaaagga

SEQ ID NO: 11383 - DNA, 238 bp, Glycine max
  Clone ID: 701064381H1
gtttcagactgcatacctgatgtactcctgcttttcacgtctctgtctaaggggtgccctgagatcagattgaacaatggtgaaggctgtggcgttcttagcagcagtgagggtgtcactggaactattcacttcgttcaggagggaagtggtccaaccaccgtaactggatctcttgctggtcttaagcctggtctccatggtttccatgtccaatgcttggggggacactaccaat

SEQ ID NO: 11384 - DNA, 252 bp, Glycine max
  Clone ID: 701064382H1
ctctcctctcgttttcgtcgctagattaggtcttcctacccaaaacaaacattcaatttctgtttcagttcgcggagatcaatatcttatctaggtccatcgtcgatagaagatacgcaataccaaaggcaatgtttttgtcggattggttttatgggattctagcgtcgctcgggctgtggcagaaggaggccaagatcttattcttgggcctcgataacgctggcaaaactaccttgcttcacatgctca

SEQ ID NO: 11385 - DNA, 252 bp, Glycine max
  Clone ID: 701064384H1
gatatctgtaatttgtgtctgctcactcgctcttctccgccacttctgaatctattgaatcaacaatcctgtcggacgaagagcaccatttcgagtccaaggccgacgccggagcctccaaaacctaccctcagcaagccggtaccatccgcaagaacggctacatcgtcatcaaaggccgcccctgcaaggttgtggaagtttctacttccaaaactggaaagcacggtcacgctaagtgtcactttgttg

SEQ ID NO: 11386 - DNA, 253 bp, Glycine max
  Clone ID: 701064385H1
caacaaacttggtcaggttccaactcttcgaacaaactaactagctaggtgagaaaaagagaaacatgccctgcctttacatcaccaccaaccttaacctagatggagttgacaccaaccccgtcttttctgaagccaccactgctgtctctacaatcattggcaaacctgagaagtttgtaatggtcatattgaagtcatcagtaccaatatcatttgagggtaacaaggaaccagcagcatatgctgagat

SEQ ID NO: 11387 - DNA, 251 bp, Glycine max
  Clone ID: 701064386H1
caaaaatccgaaatttgtgctccaacacaaaaaaatgacacctacaatcaccattctcttgttgtctctactaattctcataacttcaccctccttggcaacccgacccgcatccaaccctgatcaagtcaagcacaacaaaaacaacaaccaaggtggtggtgctggtgctggtgctggcgggttctttggccctggaggagggttcagcatacccggttttggaaacgggtttggaaatggcatcatag

SEQ ID NO: 11388 - DNA, 249 bp, Glycine max
  Clone ID: 701064387H1
gtgagaaacatggcttccttaagctccttagtgctgctccttgcagctctaattctatcccctcaagttcttgcatactatgaggtattcccagtgtgaaagcctcccactgagaaaccaccagtttataagcccccagttgtgaagcctcctgtttacaagcctccagttgagaagcctccagtttacaagcctccagtagagaagccaccagtgtacaagccaccagttgagaatcgtccagtgtac

SEQ ID NO: 11389 - DNA, 250 bp, Glycine max
  Clone ID: 701064388H1
aggccatataatttttttttatttgaaataatgtccgggatcatccacaagattgaggagaccctccatgtgggagggcacaagaaagaggagcacaaaggagaacaccatggtgagcacaaaggtgaacacaaaggagaacaccatggtgagcacaaaggtgaacacaaaggagaacaacaccatggggagcacaaggagggacttgtggataagatcaaggacaagatccatggtgatggccatgaca

SEQ ID NO: 11390 - DNA, 253 bp, Glycine max
  Clone ID: 701064389H1
cacctcccacctcataaaattatgtgactgcaaaaattgtcgaaaaacaaaacaacttcggaaaaatcttaattttttgtaaatacttccaaacacacacatatatccatgttgctgttttgttggtgaagaaatcgaagatattcaaaggcacatcatagtttgtgtgtatatatatatatagtcttcttcacaagaaatcatagtgaccaattttgccaccctaattgagctagctattcaatcgatgaag

SEQ ID NO: 11391 - DNA, 254 bp, Glycine max
  unsure at all n locations
  Clone ID: 701064390H1
cccattttcccaaaatcaccatctagagttttctcttttccactgaaaatcaaacacacgaatggatttnggaattgnaaaagaatcatggnnactctgaaactgnttnttnntcntgnaaaatcatcctnnantgnatantangaccanannaangatccatggttcaagcatccgttctcctcagaagaggaggagaaatccgccgccgccgccgccgccaagcagaagcccgttcccccctacctgaagcg

SEQ ID NO: 11392 - DNA, 257 bp, Glycine max
  Clone ID: 701064391H1
agtgaatgcatggcagagatgaccaagtacgtggttaatgaaccatctgttgggcttttcttatccaacatcatgctcaaaatgaagtacccaatatcatcaaagttaaaaaaaatgttgttaagaagtctcatgaaacaactttgcacacagaagatttggaggactctttcacgatgcttcaatcaatgaaagagtgtggatttcccatagctgataagatgatcagagattaaaaaatctctgataactatgga

SEQ ID NO: 11393 - DNA, 258 bp, Glycine max
  Clone ID: 701064392H1
gtgactgacttttcgagaaaggaaaaaaaaagagtttccggcattattccatcatgaacgctcttcccattcttctcttcttcctcttcgtttcggcattagtttatgcgaagaaaactggcgatgtgacggagttgcaaattggcgtgaagcataaaccagcatcatgtgaagttctggcacacaaaggtgacagagtcaaagtacactatcggggaaaactcactgatggaactgttttcgattctagctttgaaa

SEQ ID NO: 11394 - DNA, 262 bp, Glycine max
  Clone ID: 701064393H1
aacaaatcaaagccatggccacctccaacttctctattgttctctccgtctccctagccttctttttggtgctacttaccaaggcacactcgaccgataccgtttctttcaccttcaacaagttcaacccagtccaaccaaacattatgctccaaaaagatgctagtatttcatcctctggggtgttacaactcaccaaagttggcagcaacggcgtgcccacctcgggatctctcggtcgtgccctttacgctgccccaat

SEQ ID NO: 11395 - DNA, 262 bp, Glycine max
  Clone ID: 701064394H1
attctcaactgcgcggtgagtgagtgagagacggaaagtgcaaagtcaccgtcttctcttctcagagcttggctttgcttatcgattctctctcctctcatctttctcattcaaggtttgtaaaagatggccgatgctgaggatattcaaccccttgtttgtgacaatggaactggaatggtcaaggctggatttgctggtgatgatgctcccagggctgtctttcccagtattgttggccgacctcgacacactggtgtta

SEQ ID NO: 11396 - DNA, 264 bp, Glycine max
  Clone ID: 701064395H1
ctgtagtgtttgacattgtaatcacatttgggttggtttacactgtgtatgcaactgcagcagacccaaagaaggggtcattgggtatcattgcacccattgctattgggttcgttgtgggtgccaacatcttagcagcaggcccattcagtggcggttcaatgaacccagctcgctcattcggcccagctgtggtcagtggagacttcgctgctaactggatctattgggttggcccattgattggaggaggtttggctggct

SEQ ID NO: 11397 - DNA, 266 bp, Glycine max
  Clone ID: 701064396H1
attctccctttcctctccgaaccctcgatcactctcacgcgctcctatattcgctcctccaccgtcgctctctcgaacaaccacaacaccatcttcatcacatggcaaacgcagcatctggtatggcagtccatgatgactgcaagttgaggtttttggagctgaaggcaaaaaggacacaccgtttcatagtttttaagattgaggagcagcagaagcaggtcattgtggagaagcttggtgagcctgcccagggctatgaagat

SEQ ID NO: 11398 - DNA, 243 bp, Glycine max
  Clone ID: 701064401H1
cttcgattctctctttctctttcttcagaaaaattaaacccattcaaagaaagaaagaaagagcgatcatttccaatcacaatggcagatcaactcaccgatgaacagatctcggagttcaaggaagccttcagtttgttcgataaggatggcgatggttgcatcacaacaaaggagcttgggactgttatgcgttcgttgggtcagaatccaacagaggctgagctccaagacatgatcaat

SEQ ID NO: 11399 - DNA, 243 bp, Glycine max
  Clone ID: 701064402H1
cgatcggctgtctcatcattgccggcttctcgccgtgcaagtgctgatttcactcgtccagtgttcaccgcggttgctttttatttatgtgctaagaaacacaagcttaaagtagataaacttaagttaattgagcttcgtggtacatctgagtctgagttttctagtgtttctgctactatgaaggatttgtgccatgatgtttttggggttgcgaaggaaaagaaggatcctaaggaagtg

SEQ ID NO: 11400 - DNA, 247 bp, Glycine max
  Clone ID: 701064403H1
atgcggcatctctgacagcacaacttgtatccttgctgctcgatttgatgctagtcctgatgagataaaagctatagggaagctcattaacggcaaagagattgacctggaggagctagaagggagagcaaaccaatcccagatacaaaagatttacaagatatcttcctcggaacttggagtatcatcacttgctgatgcaataacttgtcgtatagctgctcgtgatgccctgtgagaagaatga

SEQ ID NO: 11401 - DNA, 244 bp, Glycine max
  Clone ID: 701064404H1
gtttgattggacctctctttctctggagtatcctcccctttatttcctcgtcctccaaactccaaagccgtttccaagtgtaatggattcgagttccattaacagcaacagtaaggagataaccatggagattccaagcttggttcgactttacaaggatggcaccattgaacgcctccaaaactcaccaattgtgccacccacgcttcaagatccaacttcttccaaagacgtcgtcatctct

SEQ ID NO: 11402 - DNA, 239 bp, Glycine max
  Clone ID: 701064405H1
aagagacccaacccctctcttttcttttcttcagttcggtggaaggagccgtagcagcagcggaagctctagcttgggcagcgaatcacaatggcgagaggattgaagaagcatttgaagaggcttaatgccccaaagcattggatgcttgacaaactgggtggtgcatttgctcctaagccctcatctggaccacacaaatccagggaatgcctgccactcatactcattttgcgaaa

SEQ ID NO: 11403 - DNA, 240 bp, Glycine max
  Clone ID: 701064406H1
cagcagagaagcactcatcattcttcgtttgtctaagatccgccttctctgaattgtaaaaatgtcgctcggagaaactgcttgttcatacgcagctctcatccttcatgaagatggaatcagtgtaactgccgacaagatcagcaccttgttggaaactgcaaaggttcaagtagatacctattggccaaccttatttgctaaacttgctgagaagaaaaatcttggcgatttgatagc

SEQ ID NO: 11404 - DNA, 239 bp, Glycine max
  Clone ID: 701064407H1
gcctggccctgcaagtgttgaaatcgatgatcaccctatgcaaattgaagaaacacagtacccgaaaaccttcttctataaagaagaccttcatccaggcaaaacaatgaaagtacaattcagcaagcctccctttcaacaaccatggggtgttggtacatggttaaaggaaattaaagacactactaaagaaggatatagttttgaagagctatgcatcaagaacgaagccattgagg

SEQ ID NO: 11405 - DNA, 241 bp, Glycine max
  Clone ID: 701064408H1
ttttgctcctgtcacatctcctaacactgatggcatcaacccagattcttgcacaaatgtaagaattgaagattgctatatagtttctggtgatgactgtgtggctgtaaagagtggatgggatgagtacggcataaaatttgggtggcccaccaaacagctaatgataagaaggctaacatgcatttcaccatacagtgcaaccattgccttgggaagtgagatgtcaggtggaatccaa

SEQ ID NO: 11406 - DNA, 244 bp, Glycine max
  Clone ID: 701064409H1
gctatgcttcttggcaagagttagatcggacgaggattgcgtgtacacggtgtacgttcggacgggttcgatcatcaagggaggcaccgattcagtaattggtctgaagctatacgacaagtccggctacggcatatacatcaccaacctcgaggcatggggcgggttaatggatccgggtcacaactactacgagcggggcaacctcgacatattcagtggtagaggcccttgcttggaagca

SEQ ID NO: 11407 - DNA, 246 bp, Glycine max
  Clone ID: 701064410H1
agaagaggttcaaatttcccgagaacagtgtcgagctttatgctgagaaggtcaacaacagaggcctctgtgccattgctcaggccgagtcgcttcgctacaagcttctcggtggcctcgctgttcgcagggcttgctatggtgttttaagatttgtgatggaaagtggggccaaaggatgcgaggtcattgttagtggaaaactgagagctcagagagccaagtccatgaaattcaaggatggat

SEQ ID NO: 11408 - DNA, 250 bp, Glycine max
  Clone ID: 701064411H1
acctcgagcgctcgagcggctcaggcgtgaacaagcctcaggtatgccaaagccatggttaagcataacaatgttatccccacacggacacttccgtaagcactggcagaactatgtgaagacctggttcaatcagccagcacggaagacaagaagacggttggctcgtcagaagaaagctgtgaagattttccccagacctacagctggacctcttagacccattgtacatggtcaaactttgaaatac

SEQ ID NO: 11409 - DNA, 251 bp, Glycine max
  Clone ID: 701064412H1
agacgatccagtgtgttggcagcgaaagggtgagacaagaggcttcacctgtaatcagacaattgtggtcaatgcgagactcataccattacaatgcaagtaaatgaaggacacaacagaccttgttcagacccatttttacagtggagtaaatggcagttgcttgattctcttttacctactggtggatttgctcattcttttggcctcgaagcaacagttcagtcccacttagtgtctaattccaatga

SEQ ID NO: 11410 - DNA, 252 bp, Glycine max
  Clone ID: 701064413H1
aaaaaaacctttcataacttcttttcttcctccttcttcttcgggttgtgagtgtatacgcatcacgcatggcagctttccttcgacgctggattccacgatggaagatttcttcttctccaccctgacgggatagcaaatctttcatgaaattgagaattgctgctgctaataaacaagcttccattgagatgggggagttcaccgggagtggtgagtatgtgactatcggcgaatttccttcctccagga

SEQ ID NO: 11411 - DNA, 259 bp, Glycine max
  Clone ID: 701064414H1
aattttcattttttatttttttaaaagttgaatttcaaaccaaacctctgtgctcatcggaagcatcatgatacacctcatgctcctcctccggcacaggcggaagctccaccggttccccaacctgcacaacaagaccaccagcaccggtaccgttaccgttaccgttatcgttctcctcggggtagcgcacaaccacaacgggacacacgcaatggtgcacgcagtaatcactaacactcccgagcctccccttcgc

SEQ ID NO: 11412 - DNA, 263 bp, Glycine max
  Clone ID: 701064415H1
ccgttcgctctttctttctcccctacacaaaacatggctttgcccaatcagcaaaccgtcgattaccccagcttcaagcttgtcatcgtcggcgacggtggcacaggaaagacaaccttcgtgaagaggcatctcactggtgaattcgagaagaaatatgaaccgaccattggtgtggaggttcatccgttggattttttcacgaactgtggaaagattcgcttctattgttgggatactgctgggcaagagaagtttggtgg

SEQ ID NO: 11413 - DNA, 264 bp, Glycine max
  Clone ID: 701064416H1
cccagatcttgtagcaatggcgagcgctcccactccacgcgaagagttcgtgtacatggcgaagtgcgcggagcaggccgagcgctacgaggagatggtggagttcatggagaaggtctccgcctccgccgagagcgaggagctgaccgtggaggagcgtaacctcctctccgtcgcctacaagaacgtgatcggcgctcgccgcgcctcctggcgcatcatctcctcaatcgagcagaaggaggagagccgcggcaacgagga

SEQ ID NO: 11414 - DNA, 256 bp, Glycine max
  unsure at all n locations
  Clone ID: 701064417H1
caaaattcggctccaggacaactctacagaggaatttagtcaccttcaaaaccaaaggatattggtttccaaattcatcttgagatggaaaatccatcgcaaagtgttttgcgattttgacgtctaggtaatgaagacaagagaggttgcagtgacaaatagcctctgtgaatggaattccttcggaggtgcagttgattctgaattttccatcagcatgtcttaccgnatgtcctgcaagaggataatagtaaaa

SEQ ID NO: 11415 - DNA, 249 bp, Glycine max
  Clone ID: 701064418H1
ttccaaaacactccctttccctttctattcacttcccctacccttccgtgatgatgtagatagagaataaaaagagaccagtgtgcagtgagaaagagattgctcacttcttgtgtgggtttgttttgttctttgtgttggaatttgttcatgggtgaagaaggagaagaggtgtcaagagagaaggaacaatacatgggagtttatggaaatgagtggttgtattgtggttgctctgcaaattggcgc

SEQ ID NO: 11416 - DNA, 245 bp, Glycine max
  Clone ID: 701064419H1
acataatagagaaagagggagagatgatggaggacaagaacaagaagaagaagaagaggagcaagttgtggttgaagaaggtgtcgtggccgtttcggtggaaacgactggatcttcaaacgaccatcatggacaccgtcgttttcaaggtactctacgcggctgaggctgtagttcttgtctccaccctctgcttcttctacctttgttgtggctgccacttctgaatcaccaccaccaccctt

SEQ ID NO: 11417 - DNA, 245 bp, Glycine max
  Clone ID: 701064420H1
cagaactatttctctctctcacttgctgcaggcacttgattggaacttgaaaatcaacaaaaacttatcaatctctctttttctctttctctctccggcacctcttgttaacaaattgttcttttcaccgaaacccgtaaagggtcctgagctagcttcttctccatccatggtcctgatttttctcttcctcttgttttcagcttctatatgcaaaagggggtggaccaaatgctgcaaaatat

SEQ ID NO: 11418 - DNA, 240 bp, Glycine max
  Clone ID: 701064421H1
ctcgagcgaatcggctcgagtcgtcgtggaatctgaggaaacactcagtatgaaaatcaaggaattttcctcgccataatgaacgagataatcactagaggcacatgttggtagaagattttctctggggattgacttgattgattgttcacagttcatgctaaacaaccaaccaaacggctattctgactattttttgatcctgtttctaatcttgtttcttagactgtgtctaagtct

SEQ ID NO: 11419 - DNA, 237 bp, Glycine max
  Clone ID: 701064422H1
gcgagcgagcgagcagtttcaaagagaggatttgggattgggaaggcgagggattgcgctgcgtctcttcctcttctctttcgattcatccctcattcataatcttccaatccaacaacctcagcctcacactcacacatacacacatctgaacgcgtatcgtccctcccatggcttcaaagcgcatcctcaaggagctcaaggacttgcagaaagacccaccaacttcttgcagcg

SEQ ID NO: 11420 - DNA, 240 bp, Glycine max
  Clone ID: 701064423H1
ttgatggaactgtacaagagcctcgaaagggaatcagaagtggtcatgtacctggtagcaaatgcatcccttttgcacagttgttagatagttcacagacattgttaccagcagatgagttgaagaagcgatttgaacaagaaggcatctctctggaaaccccagctgtgacttcatgtggaacaggcgtaactgcttgcattcttgcattgggtcttcatcgtcttagaaagtctgatg

SEQ ID NO: 11421 - DNA, 242 bp, Glycine max
  Clone ID: 701064424H1
gagttgaagtccaccatctcgaagaatacccgtgccattcttataaacactcctcacaaccctactggcaagatgttcactcgtgaggagctcaattgcattgcatctctttgcattgagaatgatgttctggttttcactgatgaagtttatgacaagttggcttttgatatggagcacatatcgatggcttctttgcctggaatgttcgaaaggacagtgacattgaactccttggggaa

SEQ ID NO: 11422 - DNA, 245 bp, Glycine max
  Clone ID: 701064425H1
tctcattcttcaccagctcagcacgcagaggagcagaagcctaagccttcaacatggcgagagggttgaagaaacacttgaagaggctcaatgctccaaaacactggatgcttgacaagcttggtggggcctttgcaccgaagccatcatctggaccccacaagtccagggagtgtcttcctttgatcctcatcctacggaacaggctaaagtatgctctaacatatagagaagttattgccatc

SEQ ID NO: 11423 - DNA, 247 bp, Glycine max
  Clone ID: 701064426H1
cttcatctcccaagggattcaatacaataccaggctagaagaaactccactcatcaccatctcaagcaactaattaacaagctagtactctttgagtgtttggcaattggcttagatttcttgtacttggaacaagatggaaagcactgtcacatttgagactgatctcaacctcaaggcaaccgagcttagattggggcttccaggaacagaagaaattgttgaaaaaccacttcctgcaagtgct

SEQ ID NO: 11424 - DNA, 249 bp, Glycine max
  Clone ID: 701064427H1
agaaagtgagaggagagagaaagtagcagatcctccatggcctccaccaaggaacgtgactacttcgtctacgtcgccaagctcgccgaacaagccgaacgctatgaagaaatggtggaagcaatgaagaatgtggcgaactaaacgtggaattgacggtagaggagcggaaccttctgtcggttgggtacaagaacgtggtgggtgctcgtagggcttcgtggaggattctttcctcgattgaacaga

SEQ ID NO: 11425 - DNA, 252 bp, Glycine max
  Clone ID: 701064428H1
cagggtctcttccattcacaaccttaaatctttctttcttgtaaactttattgattgattctgagaatagaactaagagggtatagacatggctagcgcaattgcagcttcttttttggttctgcttctggctttccccactgtatttggagctgaccatgaagttggtgacactagtggatgggccctcggagttaattacaacacctgggcctctgggaaaactttcacagttggtgacactttggtgtt

SEQ ID NO: 11426 - DNA, 255 bp, Glycine max
  Clone ID: 701064429H1
agagtttgttgtgagctataagctagtttatcgtgaggagaatatgaagttgtttgttttctttgttgctgcagtagttttggtagcatggccatgccatggcgcaggctaccaaaggttccctctccgaatgaaaactggctatggtgagcgttcttcggaggtaaaatgcgcaagttttaggcttgctgtggaagcacacaacatccgagcctttaaaaccattcctgaagagtgcgttgatccaacaaagga

SEQ ID NO: 11427 - DNA, 259 bp, Glycine max
  Clone ID: 701064430H1
attctcttaattattttctttttcttgatgaaagcaagctaaaaaaccaggcatcaccttcatggtagtaatcatcatcaaaagcaccacatgccaggtggaggagacagtccctatgatgaccctttcttgaattcttgttgctgctgctgccactgttttcttgctatctcatacattttcagtgctttccaaagatgcatccttttttttccttgttaccctctcttcaagtgctttgggtggaatgaatctgctc

SEQ ID NO: 11428 - DNA, 265 bp, Glycine max
  Clone ID: 701064431H1
actccttcttctccgcttcctcttcgatcatcgcttcagaatgccgccgaagttcgacccctcccagatcgtcgacgtcttcgtacgcgtcaccggcggtgaggtcggcgcggcgagttccctcgtcccgaagatcggtcccctcggtctctcccccaagaagatcggagaagatatcgccaaggaaaccgccaaggactggaagggcctccgcgtcaccgtcaagctcaccgtgcagaaccgtcaggccaaggtcacggtggtc

SEQ ID NO: 11429 - DNA, 267 bp, Glycine max
  Clone ID: 701064432H1
gtaagttttcattcaatggccagcgctcagctctcagcaatatcttcgtcgatctctacggcgtcgtttgaagggcttcgaccttcggctgttcagtttgcttccgcgggcagaattagaattggcaatctctcccaaaggtctttccggggcttggttgtcaaagccgccaccgttgttgcccccaaatacaccgcgattaagcctctgggagacagagtgctgataaaaattaaggaagcagaggagaaaactgagggtgggatt

SEQ ID NO: 11430 - DNA, 254 bp, Glycine max
  Clone ID: 701064433H1
aaaacaattaccatcgtgctgatgggcaaaactgtggcaactttcttactgatcggccatctaccaaggttcatgctgccccaggtggcggatcttccttgaattacctctttggtggtcctccagggaactaattcatcattgtgattcaaacctaccatgtgatgtatcatgtgtaaaatagatagctgcattgttttagtccagtggactttgtttcttgtgcaattgaacctcttgacaatgttggtgtg

SEQ ID NO: 11431 - DNA, 243 bp, Glycine max
  Clone ID: 701064435H1
ctttcttcttcttcttctcttcttcttcaagattgcgacgacgatccaagtgatagacactcgtttcgatggaacttgtagctgaatccgagcgaactctgtacccatacgtgactggatcctctgtagtcgctatcaaatacaaagatgggattctaatggccgctgacatgggaggttcgtatggatctaccctgcggtataagagtgttgagcgtatcaagcctattggaaagcattctc

SEQ ID NO: 11432 - DNA, 239 bp, Glycine max
  Clone ID: 701064436H1
gcgaaacacttccgtcagtggtgtccgcatatccttcccgccgataacctttccggtgatcgttcttcgctcacgcacgcgttacgctgaaggcatgaatgcgttcaaggcatacaaggcctgtgtgccaattgcttggagccccaatatctatataactctggtgaggggtattccagggaccaggaggctccataggcgcactttggaagcacttcgcttgcgcaaatgcaatcgaa

SEQ ID NO: 11433 - DNA, 237 bp, Glycine max
  Clone ID: 701064437H1
ttttcttcttactctagactcttccttttctcttctctgtctaaggggtgccctgagatcacattgaacaatggtgaaggctgtggccgttcttggcagcagtgagggtgtcactggaactattcacttcgttcaggagggaagtggtccaaccaccgtaactggatctcttgctggtcttaagcctggtctccatggtttccatgtccatgccttgggggacactaccaatggttg

SEQ ID NO: 11434 - DNA, 232 bp, Glycine max
  Clone ID: 701064438H1
tcgagcgcaccggtttgttcctgttctcgttcaaaagaaaactgacacaagtgaggctaggtgcataaacagcaatggcagaaaaaccccaaccggttcgggttctctactgcggcgtgtgcagtttgccccccgaatactgcgaattcggatccgatttcgagaaatgcaaaccctggttgatccaaaacgtccctgacctataccctgatcttctcaaagaagagaagga

SEQ ID NO: 11435 - DNA, 236 bp, Glycine max
  Clone ID: 701064439H1
ataattttgcacttatattcctgcctttacttggattctgtcgcaaaaggcaaatacatagcatcttgagcagttgagcaattgagctatcatacaaaagcaagcgaagttatgatgagcaattccaaacaaaagaagaaattgaaggcacacaagaaaaaggatgaatggttgaaggacatgaggggtaacctaagtttgctggctaccgtaattgcaactatgacctttcagag

SEQ ID NO: 11436 - DNA, 231 bp, Glycine max
  Clone ID: 701064440H1
gtagtgtttcagtggttaggtcttcccttcccactgttgccctgacaccgccttgctaatcccatcctccctctttctctctctacattttaataggaatcaatttccaaccatgacggactacaaacaagaacaggatatggagattgaagcattagaagctatactcatggatgagttcaaagaaatacactctggtgaaagtggcctaagtacttccaatcggtgctt

SEQ ID NO: 11437 - DNA, 239 bp, Glycine max
  Clone ID: 701064441H1
aatccccttcctgagccagtgcagtctgttttggaggaaggaattgatctatataaacttcacactaagagacatggaagattagagtctaccaaaggatcctacgcaaaagaatggataaaatgggaaaaacagttacgggatattctttgtggaaatgctgagtattttaattctattcaggttccatttgagtttgctgtcaagcaagtgttggaacaattgagaagcattgctaa

SEQ ID NO: 11438 - DNA, 244 bp, Glycine max
  Clone ID: 701064442H1
tcaaaatattgtgtccacagtcaatttggactgtaagttggacctcaaaacaattgcacttcaagctcgtaatgcagagtacaatcccaagcgttttgctgctgtcattatgaggataagagatcccaaaacaactgcacttatttttgcttctggcaagatggtttgtactggagctaagagtgaacaacagtctaaattggcagcaaggaagtatgctcgtattatccaaaagcttggcttc

SEQ ID NO: 11439 - DNA, 246 bp, Glycine max
  Clone ID: 701064443H1
cttcttgttcctctcgcccagaatccgagatcaaccctgacccctaaggccaggggtttttctcggcttcttcagattcctgaaatggcgtctgtttcagctttagccaagtacaagctcgtcttcttgggtgaccaatccgtgggcaaaaccagcatcatcactcgcttcatgtacgataaattcgataacacctatcaggctacaattggtattgattttctatcaaaaactatgtatctcgaa

SEQ ID NO: 11440 - DNA, 249 bp, Glycine max
  Clone ID: 701064444H1
ggatttgggattgggaaggcgagggattgcgctgcgtctcttcctcttctctttcgattcatccctcattcataatcttccaatccaacaacctcatcctcacactcacacatacacacatctgaacgcgtatcgtccctcccatggcttcaaagcgcatcctcaaggagctcaaggacttgcagaaagacccaccaacttcttgcagcgctggtccagtagctgaggacatgttccattggcaagcaa

SEQ ID NO: 11441 - DNA, 252 bp, Glycine max
  Clone ID: 701064445H1
aaacacatttgttgctcagaggaagaaccttaagctgattgatgttgatgtccccgttgttggtgggcatgccgggattaccattcttcctctgttgtcaaagacaagaccctcagcgagtttcactgatgaagaaattgaggagttgactgtcaggattcaaaatgctggaactgaagttgttgaagcaaaggcaggtgcagggtctgctaccttgtcaatggcgtatgcagcagctagatttgttgaatc

SEQ ID NO: 11442 - DNA, 256 bp, Glycine max
  Clone ID: 701064446H1
gcaagatctgcaaaccatggcttccaggaaattcgacaaccctcactccggcgacggcgccagtccaggcaaaatcttcatcggagggttagccaaagacaccaccctagagacgttcgtgaagtactttgagaagtacggggagataacggactccgttataatgaaagaccgtcacacgggtcggccaaggggattcggcttcatcacctacgccgatccctccgtcgttgaccaagtcattcaggagaaccac

SEQ ID NO: 11443 - DNA, 261 bp, Glycine max
  Clone ID: 701064447H1
cagatatcatacacaactatggccaacccatgccactctcaaacctcattgcttcactaccaatccacccatccaaaacttgcttcgtccatcgcttgatgcgaatcatgatccattctggcttcttctctcaacaaaagcatgacttggagaatgagctagaagccaagtatgtgctaaccgatgcatctgtactattgcttaagaaccatccgatgagtgtgacacctttcttgcatgccatgcttgatccagttttga

SEQ ID NO: 11444 - DNA, 262 bp, Glycine max
  Clone ID: 701064448H1
ttctgctgctacaaaagtctcccttccaatgatcatctgaaattacataggatttatagggtcatcaagaactcttcagcatcacaaaagggtattgttcttttcttctctgtcttcctttaccaaccccaaacatttcttttgtgttaaatttactgattctactcagcaatcagcactcagcaatcagcaatcagcaatcagcatcattacttttccttgtagccatgtcaatttgttttctgtttcaaaaaccaatatg

SEQ ID NO: 11445 - DNA, 243 bp, Glycine max
  Clone ID: 701064449H1
gcagctgatccctaaaagaaaaggtgtcaaccttcttcggtctagcctggtttgacattactactttgtaattcgaaatttaagtagtgaaataagtgtgaatttgatattccattgcatcaaagttgatccatatccacaacagcaaatatttatagcttatgcatctgcaggaatgttttgtagcgtttcgtttttcttttttacctctccaaaagcacatccaagacgtccacttccaaa

SEQ ID NO: 11446 - DNA, 78 bp, Glycine max
  Clone ID: 701064450H1
gtgaatggctgaattgattcaaaaaatttagaaagtgtcttttacaagggggtaaacccactttgtagctagctcagg

SEQ ID NO: 11447 - DNA, 241 bp, Glycine max
  Clone ID: 701064451H1
ctggttcaattggaagcggagggaacacaagcacgggtgtggagtggcacgtgcgacctccaaaccctaagaatcccatcgtcttcttcgatgtcaccatcggtaacattcccgccggtcgaatcaagatggaactcttcgccgatattgcccccaaaactgccgagaatttcaggcagttctgcactggggaatacaggaaagcacgactgcctgttggttacaagggttgtcatttcat

SEQ ID NO: 11448 - DNA, 75 bp, Glycine max
  Clone ID: 701064452H1
ggcagcgacacgtactcacttcaataatcgcatcgcagaagcagtttccggtgcatctcatcgtctccgcaaatg

SEQ ID NO: 11449 - DNA, 232 bp, Glycine max
  Clone ID: 701064453H1
tgttgatcgagataactagaaacagtgtgatgaaaatgaaggtccttgttttcttcgttgctacaattttcgtagcatggcaatgccatgcgtacgatatgttccctctccgaatgaacactggctatggtgcccgtactccggaggtgaaatgcgcaagttggaggcttgctgtggaagcacacaacatctttggctttgagaccattcctgaagagtgcgttgaagcaac

SEQ ID NO: 11450 - DNA, 235 bp, Glycine max
  Clone ID: 701064455H1
atactagtaatattattcttcgaatccattttattattcataatgggtattttcacatttgaggatgaaaccacctcccctgtggctcctgctaccctttacaaagctctagttacagatgccgacaacgtcatcccaaaggctgtcgaagccttcaggagtgttgaaaaccttgaggggaacggtggccctggaaccatcaagaagatcactttcgttgaggatggagaaagca

SEQ ID NO: 11451 - DNA, 241 bp, Glycine max
  Clone ID: 701064456H1
catgaattctctatcactcttcagcttcgtatgagcaatttgaacgtaatccgtagtagtcacctgcgtggaatattattacatcgtcgggacggaaaccggagaatgctcactaccgaggcgtattcgtcggagcaggagttattcgtcacatcgaggagtctagtgtacgaagatgcttccaatctttaacataatcgagaagtatatcaccgagatgccggagtgggatactaattat

SEQ ID NO: 11452 - DNA, 242 bp, Glycine max
  Clone ID: 701064457H1
atcgagataactagaaacagtgtgatgaaaatgaaggtccttgttttcttcgttgctacaattttcgtagcatggcaatgccatgcgtacgatatgttccctctccgaatgaacactggctatggtgcccgtactccggaggtgaaatgcgcaagttggaggcttgctgtggaagcacacaacatctttggctttgagaccattcctgaagagtgcgttgaagcaacaaaggaatacatcca

SEQ ID NO: 11453 - DNA, 245 bp, Glycine max
  Clone ID: 701064458H1
ccacattcaaatccaaatggccctttacattacactaataattggcctcctagtaaacaccctagtactctataaatagcatttgcatgcaccttagtcttcaccaaaatactcctcttggcatcttgtgttgtgtccctcttttaagctatttccttctcttaacacaattggttgtgccaattgccatagtcaccaaccaattaacaaaggtatatatatcatcatatcatcaccaaatgaaa

SEQ ID NO: 11454 - DNA, 246 bp, Glycine max
  Clone ID: 701064459H1
gccctttgaagatcactcaaaccaatctatctatctatctggtataggcatggagctttgttggcaaaaatctatccatggctcttaaaagaagcatggaggattgtgtgagacggttctcacccttcacactccacctcctaaagtttgcttatgctttagctattggcttctctaatcaataaccacaaaagggtatgacacatggaggaacatagttctctctatgagtggcatgaagcagag

SEQ ID NO: 11455 - DNA, 249 bp, Glycine max
  Clone ID: 701064460H1
cacaaatcgtagattgaaaaaaataataataaagaatcagaaaaaatgggttctgagaacaaagaagccgcaggtggagaacttaacaattcgtctccttcgccctcttcttctcatgcttggaaaagtcgaatcgttattccaacccttctcgcaggagttgctggtgctggagctgggttgatttcaaagcatcgaagaactcttggtcttgctactgtgtgttctaactatgctgtgaatttcacc

SEQ ID NO: 11456 - DNA, 257 bp, Glycine max
  Clone ID: 701064462H1
ggaagcagtaccggctcgtacccaagaacaagaacatggattatggcttcctgcttttgctcctcttcttccatatcttccttcctcactcctctggtaaacccagtggagtgtgtgtttctcaaggaggtcgttttcctcccttcaaatcagagggtagcactcccaaaaagggtcctaaagatttgactctttgccggatctttcgcaaaaagacttgctgcgatgtaacccatacacatcctgcacttctgtct

SEQ ID NO: 11457 - DNA, 260 bp, Glycine max
  Clone ID: 701064463H1
gctgaagtattggagctggcggggaatgctagcaaggatctcaaggtcaagcgtattactccccggcatctacagctagcaatccgtggggacgaagagctggataccctgataaaaggaacaattgctggaggaggagtgattcctcacatccacaagtctcttatcaacaagtcttccaaggagtagattactggtgaatgatagcagcttgatggaaaatttctctactaattgtgtatttgttgcatgacacttga

SEQ ID NO: 11458 - DNA, 251 bp, Glycine max
  Clone ID: 701064464H1
cctcttaataccaattttctagggtttatacaattctcgatggcttcttcagatgttgagtaccgttgctttgtcggtgggctcgcttgggccactgacgaccaagctctcgagagagccttctctcagtacggcgaaatcgttgaaacgaagattatcaacgatcgtgagactggaagatccaggggttttggatttgtgaccttcgcctcggagcagtccatgaaagacgccatcgaagggatgaacgg

SEQ ID NO: 11459 - DNA, 250 bp, Glycine max
  Clone ID: 701064465H1
gacttttcaataaatggctgacaatgttgcgcacgcaaccatcaagccaagaagtggagaaattttttgaagaacctacatcagcaggaattttaccaaaaactcaacaagggactcaaattaaggaaagccgtgcggttttgaaggtggcatggtcccattttctggccctcgatgcaacaataaagattcctttgctggtatttgttcctctctacctggctgttaatgtaaaatatggtgctgaagt

SEQ ID NO: 11460 - DNA, 149 bp, Glycine max
  Clone ID: 701064466H1
gaaaccgctactttctctattattatcatcaagtgtgagatgcatgctcctgacaaattcccagccccttttgtgcgagtgagaccatctaatcgattaattactctaacccgttcataacaactgggtatcgcacttcacagctcaac

SEQ ID NO: 11461 - DNA, 238 bp, Glycine max
  Clone ID: 701064468H1
gagctttctagttttcctatcatccaatctctttagttagctcctgctccttttctgccagaagcttcaaggaaaaacaaagaaatgagacttggatttgcttcttggagattcatcctatgcaccctagttgtctttttgattctacaagacagtgtagctagaaagatagctacaacatctgggaatgaagttcaactgaaggaagtatcctatgatttgcaaaagcttgcaacag

SEQ ID NO: 11462 - DNA, 235 bp, Glycine max
  Clone ID: 701064469H1
ctcactctctctttctctctgttttctggtaattcatcaattgattcaaaatgcagaggctcaaactgcaactagtgctattcctctcaatctcaacttgtcacactgttttctccttcactgatgggttgttgccaaatgggaacttcgagcagggcccaaagccatcacaattgaaggggtccgtagtgacaggccacgatgccataccgaattggacaatttcggggttcgt

SEQ ID NO: 11463 - DNA, 232 bp, Glycine max
  Clone ID: 701064470H1
gttcatggcctcaatggcatacaattgttcatcattggcctcggcttctcgacaaagcatgcatgtttcaaccatctcagcagcaccaacaacattgccaggtgcccctctatacttctctccaaccatttcaccagatattgagcctttgtttccaacccctggacgtgctgctttctctccatcagagtcttcaattcctactattccttcaagtcctagccctcccaac

SEQ ID NO: 11464 - DNA, 237 bp, Glycine max
  Clone ID: 701064472H1
gaaggaagaaggggtatgttgagttcgaggagtcgccgccggacgatttcgatccggcgcatccgtacaaggacccggtggcgatgctggagatgagggagcacatcgtgagggagaagtggatccaaatcgagaaggccaagatcattagggagaagctccgatggtgctaccgcatcgaaggcgtcaaccacctccagaagtgccgccacctcgtcaaccagtatctcgagtcca

SEQ ID NO: 11465 - DNA, 120 bp, Glycine max
  Clone ID: 701064473H1
cgcattgcttcgcctcacaacagcagctgcagcagcaatggctcccaaacgaggtggaaaggctccggctcttgccgctaagaagaagcctgagaaggtcacgaatccgttgttcgagaa

SEQ ID NO: 11466 - DNA, 241 bp, Glycine max
  Clone ID: 701064474H1
tttttacctcttcacattctccatttcacagggttctgatcatgttggggaagaggccccggccaatgatcggaaagttgtcggagttgttggtctcgagaggccgcacggtggcatatttggacaccaccggaagccctagaggcccattagacatgaagatgatgcaatcatcaccaagaggcttaaaaaactatgatcttggtggtgttggtcttggaattgtagtggctcttgataa

SEQ ID NO: 11467 - DNA, 244 bp, Glycine max
  Clone ID: 701064475H1
cggattcgtaactcttctagaagcttccaaaaacgctaacccccagcccgccatcttttgggcctcctcgagttccgtctatgggctcaatgacgaaagcccattctccgaactccaccgtacggaccagcctgcgagcctctacgcggcaactaaaaaagcaggcgaagatatcgcgcacacctataatcatatctatggactctccctcaccggattgcgcttcttcactgtttatgggccc

SEQ ID NO: 11468 - DNA, 247 bp, Glycine max
  Clone ID: 701064476H1
ctttcttgcgaaaccgagagagcgaaggggcaaacacaatttttattatcttcttttttattttttgtagagagagagagagagaaaatgttggggatcttcagcagttcagtggtgtcgccgccggatgagctggtggccgctggcagcagaacgccgtcgccgaagacgacggcggggaagctgctgaaccggttcgtggagagcaaggcgtcggcggtgtcgctgcaggtgggggaacacgtgc

SEQ ID NO: 11469 - DNA, 251 bp, Glycine max
  Clone ID: 701064477H1
gttgcatcaccgcaagtccacaacatggctgccactgccgctgcaggcatagcttccttgttttcttcttctattaacagtgtcaaatgtcttcgttcctccaagaactgctccattatagacccccttataaccacagtgccctcaaaccgtggcatgtttgtgtcacacttggtggaacctttgtccattgggggtgccattaattcgcacaagttgtgggggcctagaatttctgctgctgttgcaca

SEQ ID NO: 11470 - DNA, 253 bp, Glycine max
  Clone ID: 701064478H1
gctagggttaccggattcttgcgttttaatatctgcaattcagaagcatggggcactccaatgtgtggaattctcaccctaagaactacggacctggttctcgcacttgccgtgtgtgtgggaatcctcatggattgatcaggaaatatgggcttatgtgttgcaggcagtgcttccgaagcaatgccaaggaaattggcttcatcaagtatcggtgaaagattagttttccacctgccccacccggtttgga

SEQ ID NO: 11471 - DNA, 261 bp, Glycine max
  Clone ID: 701064479H1
cccctagattcagccacagttggaaaaaaaaaaaaagttgttcgagatggcacgtacgaagcaaactgctcgtaagtccacaggaggaaaggcacctaggaagcagctcgcaaccaaggctgcacgtaagtctgcaccaactactggtggtgtgaagaagccacatcgttatcgtcctggtaccgttgctcttcgtgagattaggaaataccagaagagtaccgagcttttgatcaggaagctccccttccagaggctggt

SEQ ID NO: 11472 - DNA, 262 bp, Glycine max
  Clone ID: 701064480H1
cggcggtccaaacactcttctctgcagcttttgcctacaactcccttcaccatggctgaacaaaccgagaaagcttttctgaagcaaccaaaagtgtttctcagcacaaagaagactgggaagggaaagagacctggaaaaggtgggaaccgcttttggaagtccattgggcttggatttaagactcccagggaagccatcgaaggaacctatattgacaagaagtgccccttcactggcaatgtttccatccgtggccgta

SEQ ID NO: 11473 - DNA, 236 bp, Glycine max
  Clone ID: 701064481H1
gtttgttgtgagctataagctagtttatcgtgaggagaatatgaagttgtttgtcttctttgttgctgcagtagttctcgtagcatggccatgccatggcgcaggctaccaaaggttccctctccgaatgaaaactggctatggtgagcgttcttcggaggtaaaatgcgcaagtcttaggcttgctgtggaagcacacaacatccgagcctttaaaaccattcctgaagagtgcg

SEQ ID NO: 11474 - DNA, 242 bp, Glycine max
  Clone ID: 701064482H1
cgttgcgcctttgatctctgtccccgctgcgtctctcgtaatcatgcctaagcaaatccacgagattaaggatttccttctcactgccagaaggaaggatgcgaggtcagtgaagatcaagaggagcagagatgtggttaagttcaaggtcagatgctccaagtacctctacacactttgtgtgtttgacccagagaaagctgataaattgaagcaatctcttcctccaggtttgagtgttc

SEQ ID NO: 11475 - DNA, 112 bp, Glycine max
  Clone ID: 701064483H1
gcagaagcaggacaccccacttttgccttagttagagagaccaccctttctcatcctgaaaagtctaaacttattcgagagcttcaagcagcctctggagttcactacttct

SEQ ID NO: 11476 - DNA, 253 bp, Glycine max
  unsure at all n locations
  Clone ID: 701064484H1
gaaaccccaatcccaatacactcccaactcacaaagccatgtctccaggtcctgttgtcgacgcttcccctgaggttgaagcagagcaacaacttccctccgtcgatgacgcaacccagttgnaagaaattcctcaaccgcaggacggagtgatcgctacccggttgtncgnnaggacgtgcaggcgcatcgatcgacaagggacgannncgacgatcggaggannncgacgacgcacgcatgnnnatgaaga

SEQ ID NO: 11477 - DNA, 235 bp, Glycine max
  Clone ID: 701064485H1
cttcaacctcaccaaaggaactaagaatttcattgaggctagagaaagtggtgatcaatatgtcaaagaatccaaaagttttctttgatattctaattggaaagatgaaagctggacgagtagtgatggagttgtttgccgatgcaaccccaaaaacagctgaaaacttcagggctctctgcactggggaaaaggggattggacgatctgggaaacctttacactacaaaggttc

SEQ ID NO: 11478 - DNA, 234 bp, Glycine max
  Clone ID: 701064486H1
cagaaaccctagcaaaaatgccggctggtcacggtttgagatcccgcaccagagattccttctctcgtcccttcaggaagaagggtaccatcgccctcaccacatacctcataacctaccacgtcggcgattatgtcgacgtcaaggttaacggcgccgtccacaagggaatgcctcacaagttctaccatggccgcaccggtcgcgtctggactgtcaccaaacgtgctgttg

SEQ ID NO: 11479 - DNA, 237 bp, Glycine max
  Clone ID: 701064487H1
gcaaatttcaagcacccaaattcgcggagaagaaagtggtcatcctaggaggtggtgttgccggagccaaccttgcaaaaactatacaacatcaagccaacgtcacccttattgatccgaaagaatattttgagattccatgggcaagtttgaggggattggttgagccaacttttgctgaaaggatagtgatcaaccatagagagtacttcaaaaagggtgaccttgttgtatcca

SEQ ID NO: 11480 - DNA, 236 bp, Glycine max
  unsure at all n locations
  Clone ID: 701064488H1
atatctagggtttctctttctctttcgcattctctctgaattcgtaagccatggaatcacccggtaacgagcatgtcgtgggtggccccccccataccgccgtcgctanccccttcccccacagacctgatcccctcaatttccaacccctcatcggctcacgtgccagtcccggaaagatatttataggtggtttaccgcgagatacgaccattgcccaatttatcccgcacttt

SEQ ID NO: 11481 - DNA, 240 bp, Glycine max
  Clone ID: 701064489H1
gttctgttctacttgctctcaagtttcatcttgggctgtaggctgtagcataccatgaccaccaaggatccaaaatccgtgtacgactttgttgtcaaggatgctaagggagatgatgtagatctctccttttacaagggaaaagtccttctgattgtcaatgttgcttctcaatgcggcttgaccaactccaattatacggagctgaatcaattgtatgacaagtataaagaccaaggc

SEQ ID NO: 11482 - DNA, 241 bp, Glycine max
  Clone ID: 701064490H1
tgttggaaaaattagttaaattatatagcagctgaaggtaatcacacttcttcgaatcacaacatataggaagagacgaggaaggttagatttttaagaatggaaaggaagattgccaaaaataaatcaagctgattatatctgcttcataaatttggtcaccttgcttacaagacagaggaaaccagagacgaaacatagcattgttaaaagctgtagaaaaatgtataggaaaagtgat

SEQ ID NO: 11483 - DNA, 244 bp, Glycine max
  Clone ID: 701064491H1
attggttatggtgcatatggaaattcaggttatggaaatgcagcttggagatctgaacaaactcatgcatctggaaattatgggactcctcagggaaatggtgggcaagttggttatggtggtggctatggtggtgctcagtctcgacaagcccaacagcagtaattttgatagttgaatctattgctggatcttgaacttcaacttgaggatccctggccttttcaaagtcttaaatcatgag

SEQ ID NO: 11484 - DNA, 249 bp, Glycine max
  Clone ID: 701064492H1
cctaattctacagcagccctccgatttttaaggaggttgtgtgaattgctggtgagtgatttaaatggctcctactaaggtggacaatgccaaaagggctgatcccaaagctcaggccttgacgacagctaaggctgtcaaatcaagtggtcaagtgtttaggaagaaagctaaaaagatcaggacatcggttacatttcacaggccaaggaccttgaagaaggaaaggaaccctaagtaccctcgcat

SEQ ID NO: 11485 - DNA, 253 bp, Glycine max
  Clone ID: 701064493H1
cctacaatgtatgccacaggaccatatgctcctgaaatgcagctggtgtctcctccagtcttttcaaatttcactactgaaccatctactgcacctctcactcctccacctgagttggctcacttaacgactccctcttccccagatgtaccttttcctcattttctctcatcttcagtggatctcaaaaacagtgacaagggtaactacatcactgcaaatgatcttcaagctacatattcactctaccctg

SEQ ID NO: 11486 - DNA, 255 bp, Glycine max
  Clone ID: 701064494H1
atacccaacagcacttatcgttctcatgcaacaagggaaaatgaggcctattttctgtggaaattttgaatatgatgcccggcagtcagagctggagcggctttttagacgatatgggaaggttgatagggtggatatgaagtctggatttgcttttatctatatggaagacgagagagatgctgaggctgcaattcgtgctcttgatcgagtagaatttggtcggaagggacgcagactccgtgtggaatggac

SEQ ID NO: 11487 - DNA, 260 bp, Glycine max
  Clone ID: 701064495H1
agttgaaagacagaaaggaaggatgggagtgacaccgaaaattgctccttcgatgctctcttccgacttcgccaatttggcttccgaggctcagcgcatgctccacttcggcgccgattggctccacatggacatcatggatgggcattttgtccccaatttaactattggcgctccagttattgaaagtttgagaaagcacacaaagggatatttggattgtcaccttatggttacaaatcctcttgattatgttgagc

SEQ ID NO: 11488 - DNA, 233 bp, Glycine max
  Clone ID: 701064496H1
ggcgtaacaaaagttgcgtaccatactctgattcattagtgaagaaaaatggcaaccatcatcgccggcatcccaactacatcgatcactcgcgcaggtcttgtgctcaaacgacctgtttgagcctcgtcctctaccgttcttggattgccagcaatggtaaaggcagggaagtgaggtgcttcatggagaaaaaccttcaagcagctcaatatagggatgggggcatcttg

SEQ ID NO: 11489 - DNA, 165 bp, Glycine max
  Clone ID: 701064502H1
acggaacgagcgtgctgccaagatggttctggtagagaagctctgggatgacgtagtcgcagcacctccacatgccacgaggcccacacatgcgatggaagagccaccgcgtcaattaagctactgacttctgagtaatgcatggacggcagagataggaattgt

SEQ ID NO: 11490 - DNA, 147 bp, Glycine max
  Clone ID: 701064503H1
ctggtggcacctttgcaccaggtagatgttctaaatacgttgccaattgtagtgctggcgattcatccactgtaccctatatcgttggacactacgtattacttgctcatgaatctgctgccacattatacacgacaaaatatcagg

SEQ ID NO: 11491 - DNA, 135 bp, Glycine max
  Clone ID: 701064504H1
gcgcatcaaacgcaaccagaagcagccatggccactgcaagaactgtgaaggacgtttctcctcatgagttcgtcaaagcttactcttctcacctcaagcgatctggcaagatggagctgccagagtggactgat

SEQ ID NO: 11492 - DNA, 146 bp, Glycine max
  Clone ID: 701064505H1
cgccacctttaatcttcgtcaacgttacttttccacctcagggcttcaattgagagggaaagggactgatggcagacaacacacagtcttactgggaaggctacaaagcgttttggtcagagaggttttcctttttgagcaactat

SEQ ID NO: 11493 - DNA, 147 bp, Glycine max
  Clone ID: 701064506H1
attttgttgatcgagataactagaaacagtgtgatgaaaatgaaggtccttgtcttcttcgttgctacaatttccgtagcatggcaatgccatgcgtacgatatgttccctctccgaatgaacactggctatggtgcccgtactccg

SEQ ID NO: 11494 - DNA, 165 bp, Glycine max
  Clone ID: 701064509H1
ctcaaggagatggctctgggaagaggcagtgcagtggttctactactttgcttcttgctgcttcactctcagatggctcgtgctgccacctacacagttggagattctgggggttggacctttaacactgttgcctggcccaaaggaaagctctttcgggctggt

SEQ ID NO: 11495 - DNA, 162 bp, Glycine max
  Clone ID: 701064510H1
ccttcttacctgctacttactactatagtgtctgactcacaggccagacggcaaagattttgagcacaatggcctcgacacaatgctttttgcaccaccacgccctcaccactccagctagagcttcaacacagcgcctagttgtgagcaccaaaccaaacc

SEQ ID NO: 11496 - DNA, 165 bp, Glycine max
  Clone ID: 701064511H1
caattaaggagcagaaaaaagtcacatattttgttgttgaattcatcaatatggctaagggaatcagaaacctaagttcgtggatggaggttgccccggcaccaataattttcccaacaaagccttctaattcgcctgctttggagaccatcacagaagaagttg

SEQ ID NO: 11497 - DNA, 163 bp, Glycine max
  Clone ID: 701064512H1
ccatgggatgccattatgatttgctcactagctgtttgataaaatgctccagctgaatctttttgtataagatgtggttttcgtccgtttgatagtgtgcactgttagaattatcgtgtgcttaatgtaatcaacttaaggcatcagttccctgagctagtgg

SEQ ID NO: 11498 - DNA, 165 bp, Glycine max
  Clone ID: 701064513H1
cattcaatgacattcacagtcccgagtcctaacctgagttgtgtctcaacttgctcttcttcttcttctctttcaccctccaaattttctcactctctctttatcttcacctgctcagtttaaagcttcagatcacaaccgatccaccattcaccactttctctt

SEQ ID NO: 11499 - DNA, 166 bp, Glycine max
  Clone ID: 701064517H1
caatagcactcgatctagagagcgtcctaatcgcaaccctaataagaagaaccacagcttcaagcgagtgacatccaccagccatgggtcgtatgcacagccgcggtaagggtatatcctcttctgctttgccctacaaaaggacaccccctagctggctcaagat

SEQ ID NO: 11500 - DNA, 143 bp, Glycine max
  Clone ID: 701064519H1
acgacttcagaaaagtggttagcatgtcggacgatgagagacaggagaaagagttggatctcacttctccggaagttgtcaccaagtagaagagcgtcgcggagattgtgtaacagggctttgcagttagttatttcagaatg

SEQ ID NO: 11501 - DNA, 133 bp, Glycine max
  Clone ID: 701064520H1
tataagtgagtttatcgtcaggtgaatatgaagttgcttgttttatttgttgatgcagtaattttggtagcatggtaatgccatggcgcagactagcaaaggttacgtctgcgaatgaaaactggatatggtg

SEQ ID NO: 11502 - DNA, 150 bp, Glycine max
  Clone ID: 701064522H1
cgctcctaggaagcagcttgcaaccaaggctgcacgtaagtctgcaccaactactggtggtgtgaagaagccccaccgttatcgtcctggtaccgttgctcttcgtgagattaggacataccagaagagtaccgagcttttgatccggaa

SEQ ID NO: 11503 - DNA, 144 bp, Glycine max
  Clone ID: 701064523H1
tagatggatggcagccgtgctgccgctgggaatcatagcgggaatgctctgcgtcatgggaaacgctcagtattacattcacaaatccgcgcatggcagacctaagcacatcgggaacgatatgtgggacgtggccatggaacg

SEQ ID NO: 11504 - DNA, 162 bp, Glycine max
  Clone ID: 701064525H1
ctcaagcttagccaataaggttgctaaagtagcaggctcaattaaccctggagaatctgcatctcctgccagtcttgggatggctgcaggggcttctgttcttgaaacggtgaaagaattagcaaaagacaatgattcttcaaaggagaaaaatcaagttca

SEQ ID NO: 11505 - DNA, 160 bp, Glycine max
  Clone ID: 701064527H1
cagattctcaggattcgtgtgtcgtgcgggtagtttgtcagagtatttgacaggactttgcattttgcgagttaaatttgtgtttttcttttttggtagctcttgagcagaatagtatctttgtctaggatgaagaatgaaccccgtgtttttctttatt

SEQ ID NO: 11506 - DNA, 161 bp, Glycine max
  Clone ID: 701064528H1
aactcacacactttgtactctccgtccttccttcttcgatccagatctctctccttctccctcaaatggcttcccttctgcaatgttccatgcccctcgtctctctttcccatcgagctctggtacccggtaccaggatctccaacccaagttcagtttcc

SEQ ID NO: 11507 - DNA, 163 bp, Glycine max
  Clone ID: 701064529H1
cgcatcatgcggctggaagaagggtacatcaaagaaggcagcacagtaagtgtaatgggagttgttcagaggaatgagaatgtgcttatgattgttcctccgccagatccaatcactactggttgccaatggaccaaatgcatttttccatctagtcttgagg

SEQ ID NO: 11508 - DNA, 101 bp, Glycine max
  Clone ID: 701064531H1
cgagctagctagaagcaataagatgaaaatgaaagtgcttgtgctgtctgttgctacagttttggtagcatatgaatgcctatgctcagactaccagaagt

SEQ ID NO: 11509 - DNA, 155 bp, Glycine max
  Clone ID: 701064532H1
tcaacttcatgctacacactatcgttcttccaagtgccaaccacgcttatctctgaagtcatcggcaaggtcgagatcggaatcaacggatttggaagaattggccgtttggttgccagactcgctctgcaaagagacgatgtggagctcgttgc

SEQ ID NO: 11510 - DNA, 131 bp, Glycine max
  Clone ID: 701064534H1
gggatgccgttgttgctggccctcaacctgagcgtggccttggcaagctcagaaaactcaccaccctcaaaactattgatgaaggagacagtagcaagctgcagaagacgttgtcgatgccgtcgacaccg

SEQ ID NO: 11511 - DNA, 172 bp, Glycine max
  Clone ID: 701064535H1
cggctcgaggtcgggttggatttgtaggaggaagtaagacaacacaacacgaatttcattgcagagtgttattttgagtatcagcatcaatggctccaattgcagtgggaaacgtgattccagacggcattttggcttacttggatgaagaaaacaaaccccaaactgtctc

SEQ ID NO: 11512 - DNA, 149 bp, Glycine max
  Clone ID: 701064536H1
tcggctcgaggatcgagataactagaaacagtgccatgaaaatgaaggagcttgttttcttcgttgctacaattttcgtagcatggcaatgccatgcgtacgatatgttccctctccgaatgaacactggctatggtgcccgtactccg

SEQ ID NO: 11513 - DNA, 162 bp, Glycine max
  Clone ID: 701064537H1
caacactgtctccgtctggatggcggcatcgcgaatcgtggcccatcctccgccctatccccaccgtcaatctccgccgtcagatgccccgccgtccctcaacctcacacttaatccaaaacggtaccgtaacctcggcattcgcgcctcccttcgcggcca

SEQ ID NO: 11514 - DNA, 162 bp, Glycine max
  Clone ID: 701064538H1
cgggagatctgaacgcagctgacctgttgactctggagaccactactgggcatgtaatgtattttgtgtgctgcattttaatttgataactacacagtagcacgtttaagacccaatatagctctgtcgccacattagcatgtaaggtatttgaattttaaa

SEQ ID NO: 11515 - DNA, 155 bp, Glycine max
  Clone ID: 701064542H1
ctattgggtcggacgctgttgaggggcacgagcagagtttggccatgaaggtctggaactttgcctgccctgatgcccccggtggaatcgataacccctggatcaacccctgtgttcctggggcaccctctttggccactcttgcctgctctaag

SEQ ID NO: 11516 - DNA, 156 bp, Glycine max
  Clone ID: 701064543H1
tcgtggcgtgggagcacaagagtaaagtacctggaaagatgcatgcatgcggtcatgatgctcatgctgccatgcttcctggtgctgcaaagatcctcaaagagcatgaaaatgagatacgaaagacggaggtggaggggctaagaaaattttaga

SEQ ID NO: 11517 - DNA, 155 bp, Glycine max
  Clone ID: 701064544H1
gctggaattgcattgaataagaactttgtgaagcttgtctcttggtacgacaacgagtggggatacagctcacgtgtcattgatcttgcttgtattcgttgccaagaagtctctttaaggtgttacttcaaagtagtatgtcttcacattattag

SEQ ID NO: 11518 - DNA, 147 bp, Glycine max
  Clone ID: 701064545H1
tttaaggttaaggcgtagatcaatgttatgttggttgggcatgtggactttgaggaggtctccaacattaacgatctgcacaagcttgttgtggagacagaagctccagtgcatgccatatgagggcatggacgtacggcctcggag

SEQ ID NO: 11519 - DNA, 144 bp, Glycine max
  Clone ID: 701064546H1
ctgacgctttgtttttccatcttccgatgtcactcttgtctgtcagtctgtctttctatttgtcatttcaataagtactgtgcaagtaggttagagttgggtagaagggcatgttcatcgtgttaattactatgttatgtatgc

SEQ ID NO: 11520 - DNA, 167 bp, Glycine max
  unsure at all n locations
  Clone ID: 701064547H1
caacaagaagggtgagctacagtcaagtagtgtcatttacgcttctcttctctgcagcaacacgnctaaccctaaggccttcttcgacatgaccatcggcggtcaatctgctggccgcatcgtgatggagctctacgccgacgtcactccccgcaccgccgagaact

SEQ ID NO: 11521 - DNA, 150 bp, Glycine max
  Clone ID: 701064549H1
ctagagatcgtcgtatatagatctctgttaagtcgctttataacactcaacctaagatgcagaacgaggaaggacagatcaccgagctttacattcctaggaagtgctctgccacaaaccgattgattaccgctaaggaccatgcttcgg

SEQ ID NO: 11522 - DNA, 148 bp, Glycine max
  Clone ID: 701064550H1
actcttatcacatttgcagcatcaaaatgagtggtagcaacgatggtagcggcagtcggagctctaggtttttgaaggtggctagtgcagctgccgctacagccgccgttgccggcggtttatatgccattctttcatcctcaacctc

SEQ ID NO: 11523 - DNA, 147 bp, Glycine max
  Clone ID: 701064551H1
ctagctctctgctatggctcggccacttgtaatgatccaccctctatcaaacaattattcacatattggcttcactcttgtgagccttatggtgtgtgccattgcattgctcacgtgtgcttctcattcgcaaaaatggcatcagtg

SEQ ID NO: 11524 - DNA, 157 bp, Glycine max
  Clone ID: 701064552H1
cagtttgttgtgagctataagctagtttatcgtgaggagaatatgaagttgtttgttctctttgttgctgcagtagttttggtagcatggccatgccatggcgcaggctaccaaaggttccctctccgaatgacaactggctatggtgagcgttctt

SEQ ID NO: 11525 - DNA, 158 bp, Glycine max
  unsure at all n locations
  Clone ID: 701064553H1
cgcacaccaccacccaccaccctgcttagaccaggtcctctctctctctagagagatcgaganaaacagaaaaaaaaaaacaactaacattaacgcttttaatagtaagacatggctcaacccagttccaacggggatctgaataataaccagcagca

SEQ ID NO: 11526 - DNA, 157 bp, Glycine max
  Clone ID: 701064554H1
ctattatgtgtgttgtggagtctgattagctaggttaatcttagtcgatttcagatggctttctcatatctagtttacaatgctatattatttaggttttttaagcacatactcctaagacgcgcattatcaattattaaataatacatggaaagaa

SEQ ID NO: 11527 - DNA, 160 bp, Glycine max
  Clone ID: 701064555H1
cgtatcacttcagtgcttgctgtcgttgcttcatgacacacaacggtgcgatttgttggactcgatcagatccagggctaggagcgtactcacgagataacggcgccatttttcagcgtaattcgtagaaattccaacttcgtctcttctctcctaaatc

SEQ ID NO: 11528 - DNA, 159 bp, Glycine max
  unsure at all n locations
  Clone ID: 701064559H1
cggtcgagcgatgttgttcgcactgagtctttcatctctctatatttgcatcattcatcggatatggatctcgaggttgtcgntaacgctgctgttaggggctccaaatgttctcggagattgtccattttcccaaagggacctcgtaactttcgagga

SEQ ID NO: 11529 - DNA, 162 bp, Glycine max
  Clone ID: 701064561H1
acgtgcgctccgaatatcgggtctggcacttgcttcgtgagaaccagtcaaagacagtacgggagaaaagataccagctcataccttactagttcctactgctgctactacattaggtcagccagtttgcgagtgttggaaccgggtttcagcgtctccgtt

SEQ ID NO: 11530 - DNA, 157 bp, Glycine max
  Clone ID: 701064562H1
ctgattcagaaactcttaggcattccacattctcaaccccgaagcctaagagcagagcgaaaatgacaaccaccttcgcgaccgtcgcaggactcggtggcgcattactgtcatccacctcatctcgtctcacctcagggtttgtgaaatccccagt

SEQ ID NO: 11531 - DNA, 159 bp, Glycine max
  Clone ID: 701064564H1
tcttaactcaacttctgctacccactctcttcttccaagtccaaccacgcttttctctacagtcatgggccaggtcaagatcggaatcaacggatttggaagaattggccgcttggttgccagactcgctctgcaaagagacgatgtggagctcgttgc

SEQ ID NO: 11532 - DNA, 157 bp, Glycine max
  Clone ID: 701064565H1
tctcgagccgctcgagccgctcgagccgttgttttttagtttttgactagctgttgaaggtatctttggaaccgagtgctatttggaatatgagttttgtgatatcagttgtggatggtatatatggtattggggctttgcgagtttcgtattacct

SEQ ID NO: 11533 - DNA, 169 bp, Glycine max
  Clone ID: 701064566H1
cggaacaggatcgaggctagctacatatcggataagacgttgaacttagacgtgttgtcgcagcacattgttgattgataaatttactagatggcatattgtcccaaaaaccgtttcaacatttcatcatgatggagattttacatttgagaatatgatttatttgagt

SEQ ID NO: 11534 - DNA, 147 bp, Glycine max
  Clone ID: 701064567H1
ctggacgcatatcctaattttaactttgttggtcgcctcctaggccctagaggaaactctctaaagcgtgtagaagcaagtactgagtgtcgtgtcttgatcaggggccgtggtagcattaaggatccagctagggaggaaatgatg

SEQ ID NO: 11535 - DNA, 144 bp, Glycine max
  Clone ID: 701064568H1
cgttgcgacttaaggggaaacaatggtgtcgctgaaactgcagaaccggctggccgcaagcgtgatcaagtgtggcagaggaaaggtttggcttgacaccaatgaagtcaacgtcatctccatggctcattctcggcagaacat

SEQ ID NO: 11536 - DNA, 154 bp, Glycine max
  Clone ID: 701064570H1
cttgacttgacaatgaggcctgctcttgctttgcttcctcttctatttgctctctcgttagctgccactacagaatcaagaaaagatacaggggaatattggaaaatgatcatgaaagatcaggaaatgccagacggacttcaaggtcttgttt

SEQ ID NO: 11537 - DNA, 135 bp, Glycine max
  Clone ID: 701064571H1
tgaacttgagatggatggaagcggtgctgccgctgggaatcatagcgggaatgctctgcgtcatgggaaacgctcagtattacattcacaaatgcgtgcatggcggacctaagcacatcgggaacgatatgtggg

SEQ ID NO: 11538 - DNA, 150 bp, Glycine max
  Clone ID: 701064573H1
ctggggtggtatagcttttttttttaatctgttgttagtttggttataaatattagttggaagattaattagaatctgtaattttttctttctttctttttttctcaaataatataaactcgaaagcaacggctgagattggctttgagg

SEQ ID NO: 11539 - DNA, 151 bp, Glycine max
  Clone ID: 701064574H1
gccgaaagccaagaaaaagctttcgatccctgtaactgcgatcgactatttagggttttttcggagacaatggcggatgaatcggagcacacggcggcgccggctgccggcgaatcgctgctcgacaagatcgacgagaagattcacggcc

SEQ ID NO: 11540 - DNA, 151 bp, Glycine max
  Clone ID: 701064575H1
ctcttgcctttcgggattagtttctatggcttatgaagtaatagagtaccgatgcttagtcggtgggcttgttctgggacagcgacaaccatgctctcgagaaagcattctctcattatggtgagatcgtcgaatcgaaggttatcatcga

SEQ ID NO: 11541 - DNA, 151 bp, Glycine max
  Clone ID: 701064576H1
ctagctattagttcgattttgtagtaagtgaggtgccaatatggtgaagatagctcttggtactttggatgactcttttagcgctgcctctcttaaggcttatttcgcagagttccacgcaactctgatttcagtgttcgctggtgttgga

SEQ ID NO: 11542 - DNA, 153 bp, Glycine max
  Clone ID: 701064577H1
ctttatttgtaaagacagtgacatttagaagaagcaaaaagaagtttattgagattcagacatggaggtttcagcgctgagtaaaacctagaaaaacagacaaaaatagtgaaaatggaatcgagcgttctggaatgtctgggcatggagata

SEQ ID NO: 11543 - DNA, 153 bp, Glycine max
  Clone ID: 701064578H1
gttgtgatggatcagttctactggatgacacgcacaacttcactggcgagaaaacagccctacctaatctgaattcaataagaggtttggaagtggttgatgagattaaggcagcggttgacaaagcttgcaaccgtcctgctgtatcatgtg

SEQ ID NO: 11544 - DNA, 156 bp, Glycine max
  Clone ID: 701064580H1
gtgcttttgccttgtggagttgtgggctaataaatttcaagtcaatcaacatcgttggctacaactgtactcagaacagaacagaaaccatctcttatcccagagttgttgtcttaatttttcttattacttgttattttttgttagcaggaagat

SEQ ID NO: 11545 - DNA, 154 bp, Glycine max
  Clone ID: 701064581H1
caatcatcatggcttcagcagcatctgggtttgtgctgtctcttaatgttgcagcttccaccacaaactcaagggtggtcttgttcaacacaaagaaccacgcttctaggcttcttgtgagggcttcagacgagcctgcagcggcggcacccgc

SEQ ID NO: 11546 - DNA, 151 bp, Glycine max
  Clone ID: 701064582H1
ctgtttgccttggagaaacgagttggtgttctttgttggcgaatactcactcacgcgtttgtagttgcaggctctaatcagatcccaaatgatcaactttgtgcttctcattagtcgccaagggaaggtgagattcacaaaatggtactca

SEQ ID NO: 11547 - DNA, 143 bp, Glycine max
  Clone ID: 701064583H1
taaggttcgaattaggatcgagactagtgctagatcacgagcgcgagactagtcatgaccactgcaagaactgagatggaagtttcactcatgagatcgtcaaagcgtacgctactcaactgaagaggtctggcaagatggac

SEQ ID NO: 11548 - DNA, 152 bp, Glycine max
  Clone ID: 701064585H1
ttcagatcgagacatttttgatcgagataactagaaacagtgtgatcaaaatgtgggtccttgacttcttcgttgctacaattttggtagcatggcaatgccatgcgtacgatatgttccctctccgaatgaacactggctatggtgcccgt

SEQ ID NO: 11549 - DNA, 101 bp, Glycine max
  Clone ID: 701064586H1
cttatcttatagtatcggttagctcttccatttcgcaatctgttccataccacataagatttaacaaagatggatgtagaaaagttgaagaagatggacag

SEQ ID NO: 11550 - DNA, 149 bp, Glycine max
  Clone ID: 701064587H1
cgagtaggactcgacttgccgcagttgtctacaactccgcttgctcacattgaagaagtgcccattcttctttcggtttagctgtttgttatggaggacggggataacattctggatgccatatacgatgaggacaacttagatgatga

SEQ ID NO: 11551 - DNA, 119 bp, Glycine max
  Clone ID: 701064589H1
cggctcgagcctactgacctgcgatttacaactagtggtgtctgactcacaggtcagtagtgtcaagatttttagcacgatggccgcgacatgatgcgtggtgaatcatcaggtgctat

SEQ ID NO: 11552 - DNA, 149 bp, Glycine max
  Clone ID: 701064590H1
ggaaattgtgtccttatatcaaaggttttgtcaacttgaccgcaacgccaagggatttatttccgcagatgagttcttgtgcgttcccgaatttgccatgaatccactttctcagaggctgctcaagatggtcgacggtttgaatttta

SEQ ID NO: 11553 - DNA, 142 bp, Glycine max
  Clone ID: 701064591H1
ctctcttaggcactttcttgttttctctctcaccctcatatccatcatcttccacacccatggagcgtgatctgagcaatcaataatcaagttacccacagaccaaccaagggtagagaaactgaggcacttgcattttttc

SEQ ID NO: 11554 - DNA, 166 bp, Glycine max
  unsure at all n locations
  Clone ID: 701064592H1
gtagtaagtaggaattgagtgagttgaggtgaaattgttttattgaggaagtttggaattccaccaatagtttcatcgtcatctaattatcaataactgcagagtatataatatatgaaatataaaaaagnagtcatgatgatgataagaattagtagatgttatg

SEQ ID NO: 11555 - DNA, 151 bp, Glycine max
  Clone ID: 701064593H1
cattttcttggtgagaagaagtaaaagacaaaaggggaaaaaagataccagctataccttactagttactactgctactactacattatgtcagcaagtttgtgtgtgttggaaccggttttcatcttttcctttcttttttttttattta

SEQ ID NO: 11556 - DNA, 151 bp, Glycine max
  Clone ID: 701064594H1
gctggttgccacactacaccgatatttccaccaaacccgtttgccctgttgtttgcgaataaatggcaactaagaggagcgtgggaacgttgaaggagggtgatttgaaggggaagagggtattcgtgagggtcgatctgaacgtgccttt

SEQ ID NO: 11557 - DNA, 89 bp, Glycine max
  Clone ID: 701064595H1
attaattgcaagaatggcacttcgttgcttggtgatgtccctttctgtactcttcactcttggccttgcgagagaaagccatgccagag

SEQ ID NO: 11558 - DNA, 154 bp, Glycine max
  Clone ID: 701064596H1
caacggctcgttacaagagccgctgagtacaaattcccagaccctattcccgaatttgcagatgccgagactcaaaaattcaaaagccaccttctcaaaaagctttcaaagaaagatatgtatggagaatcaattgaggaagttgtaggaattt

SEQ ID NO: 11559 - DNA, 161 bp, Glycine max
  Clone ID: 701064602H1
acgggttctcaccacggctggtaccttaactacgtccaggtcacctccactgggccccacctttcctgcgctcaggatcagtacgaggtggagcagtggctcgctctcgacacttcgccttaccagctttgggccgttaggaaccactgccgctacagttt

SEQ ID NO: 11560 - DNA, 169 bp, Glycine max
  Clone ID: 701064604H1
gctccctgagagagctcgtcgcggcggttgcagaagaagattgcaagatgaagttcaacatcgcgaatcccaccactggatgccagaagaagctcgagatcgacgacgatctgaaactgcgagcattttgggacaagaggatctcacaggaggtcatcggagatgcact

SEQ ID NO: 11561 - DNA, 169 bp, Glycine max
  Clone ID: 701064605H1
cgtccatcccgtaaccatgtctcagactgttgtcctcaaagttggtatgtcatgtgaaggatgtgttggagcagtgaagagagttctaggaaaattggatggtgtggaatcatatgacattgatttgaaggaacaaaaggtggtagtgaaaggcaatgtccagccagac

SEQ ID NO: 11562 - DNA, 166 bp, Glycine max
  Clone ID: 701064606H1
gtcaaggaaaactaagttcttcagtcttgacttgagtgctttgagttcatggatccaatccaacacaagttcgtcaacgttggtgctctcaagctccacgtcgcagaaaccggaaccggtccaaacgccgtcgtattcctgcacggcttcccggagatatggtact

SEQ ID NO: 11563 - DNA, 166 bp, Glycine max
  Clone ID: 701064607H1
ctcttccaacacttagtaatcttgaggaagcgcttaaagcagaggaaaaggccccacctggcactgcaaggaggaggaagagatcggaatcaaggagtgtatttggggactcaacaccagcaaggccaagtcctcgtggttttgggagcaaaaattgaaaatccat

SEQ ID NO: 11564 - DNA, 166 bp, Glycine max
  Clone ID: 701064608H1
ccagcagagagtgcggtaggctcttccgagacccgaagcagccatggggatcgatctcaaggccggaggtaagagcaaaaagaccaaaagaacagcacccaagtccaatgatatctatctcaagctcttggtcaagctttatcgcttccttgttcggagaactggc

SEQ ID NO: 11565 - DNA, 167 bp, Glycine max
  Clone ID: 701064609H1
actgctctctctctcaatttcccttcactctcacgcgccgccgtggtttccgccggcggccactccctatccgccgcgcatccatcccgcttccctctcctcgcttttctctaaaaaaaattaaaaatttctctgaagaccgtgttatcactaccgttccctgagtt

SEQ ID NO: 11566 - DNA, 166 bp, Glycine max
  Clone ID: 701064610H1
cagagataaggaaggcattgataatcatagctatggcaacggcgagtgcaagttgtgcggtatcatttagaaacagcttcggtgtgagttaaccctcggatcttgggttcttgagctctcgtctgaacggcctcagaatctgcttccccaaattgccacccacacc

SEQ ID NO: 11567 - DNA, 167 bp, Glycine max
  Clone ID: 701064611H1
ggcgaatctagcacacttctccaagagagctctaagaagcgcacacgcgctcgcaaggcaccacgtgcagccgcagctgctggcagcggaacgcgcttttgcgacggaggcggcgaaatcgatatccccgtcggcggatcgcgtgaagtgggactaccgagggcaga

SEQ ID NO: 11568 - DNA, 157 bp, Glycine max
  Clone ID: 701064612H1
ctggatattgacgctggtgcttctccttccactgccatgctatctgaactctctcgtctcttgaaaatcaccatagttggtggttccattccagaacgctctggaggtctcttgtacaacacttgctgcgtgcttggcaccgacggaaacctactag

SEQ ID NO: 11569 - DNA, 157 bp, Glycine max
  Clone ID: 701064613H1
ggagaggaatcttaattagtaatatatttactgctgaatacaaatgaccaaacaaaggtggttcctggcactgatggtaatggctctatcgccaaggccactctcacattcactaccaaagacgatgcaccactctcagatgcagtgcgtgatgaaa

SEQ ID NO: 11570 - DNA, 155 bp, Glycine max
  Clone ID: 701064614H1
ctctcctaggaagcagcttgcaatcaaggctgcacgtaagtctgcaccaactactggtggtgtgaagaagccccaccgttatcgtcctggtaccgttgctcttcgtgagattaggacataccagaagagtaccgagcttttgatccggaagctcc

SEQ ID NO: 11571 - DNA, 161 bp, Glycine max
  unsure at all n locations
  Clone ID: 701064615H1
ctagtgcgtgtgtgttgtagcagcgagagaaggaaggaggtaactctaacacagacatcactgcatcgacgaagccagagtaccctgtcattgatcgtattcctnncttcaccaaagtcgtcggcaactctcaacaccctcgactatctccgattcgtcac

SEQ ID NO: 11572 - DNA, 161 bp, Glycine max
  Clone ID: 701064616H1
gtatttccctacctctcccttcaagatgcagatcttcgtcaagaccctcaccggcaagaccatcacccttgaggtggaaagctctgacaccatcgacaacgtcaaggccaagatacaggacaactgaagaatcccgccggagcagcagcgtctcattttcc

SEQ ID NO: 11573 - DNA, 171 bp, Glycine max
  Clone ID: 701064617H1
tcttagaatagaatgggatctggaagtggaaaacacactggagagttcttcaggagaagggatgcatggaggaagcatccgatgctcaccaatcagctccgccacgccacccctggccttggcatcgccgtcgtcgccttcggtatctacctcgtcggcgaacaagtctac

SEQ ID NO: 11574 - DNA, 169 bp, Glycine max
  Clone ID: 701064618H1
attgaattcagcacaggccttggctgcacacactttccttttttgcttcactctcttcctcgttctcaagctcgatcacaatctctcttcttcttggtgggtaatatttttacctctttggatgttccatggtgttgtggctcgaggaagggtttcattacctgcgcca

SEQ ID NO: 11575 - DNA, 169 bp, Glycine max
  Clone ID: 701064619H1
ctcaatcacaagacccttttggtggtagtggttacggatcagtgaataataaggacttctacaactgcaccttgttggctgctacttcacccaactcatggggggactatgagcaacacatcaacatcaacaaagaagaagaacaaggtggtgcttctatctccacttt

SEQ ID NO: 11576 - DNA, 109 bp, Glycine max
  unsure at all n locations
  Clone ID: 701064620H1
ctccttctgcgaaatcacttcctcttccaaggaagaagctctttcctttttggagagccacaatttcgacctagacgctgacgttccgantttcgtcgacaacgccaac

SEQ ID NO: 11577 - DNA, 165 bp, Glycine max
  Clone ID: 701064621H1
caatcatttccagatttctgaggatgggttactattgctataaacgcaattatagtactcatacatcagatgttattgtgatgttggcggtggccttgatgcttcttggcataccttggctctttacgcgtgaacaagtggtggtagttgaagaaaagaagacga

SEQ ID NO: 11578 - DNA, 163 bp, Glycine max
  Clone ID: 701064622H1
tcttcatccttctctgttctcctagaacttgattacttgaacattccctatgacagatgacgtggttcttctggatttctggccaagtccatttgggatgagggtcaggattgcacttgctgaaaagggtatcgaatatgagtacaaagaagaggacttgagg

SEQ ID NO: 11579 - DNA, 162 bp, Glycine max
  Clone ID: 701064623H1
cagaaaaccctaattcgctcgcagtcacccaagacgcgaatccttaccattgctcgagatgggtgaagaagtgaaggccgtggttccagagtctgttttgaagaagcagaagagagaggaggaatgggcgttggccaagaagcaagacctcgaggctgcgaa

SEQ ID NO: 11580 - DNA, 161 bp, Glycine max
  Clone ID: 701064624H1
gttgatagccatggctacccgtggaaagcttgaggttgacattgatctcaagtccaacgcagacaagtactggcaaacccttaggaattctactgaaatattccctaaggccttcccacatgattacaaaagcattgaggttcttgagggtgatggcaagt

SEQ ID NO: 11581 - DNA, 164 bp, Glycine max
  Clone ID: 701064625H1
gttggaaagaaaccctagcaagcggaacaatggcagacgttgaggtcgatgtggcggctgcagcagcagcagggcagccgaagaagagaacgttcaagaagttcagtttcaggggcgtggatctcgatgcgcttctggacatgtccaccgatgaactcgtgaag

SEQ ID NO: 11582 - DNA, 164 bp, Glycine max
  Clone ID: 701064626H1
gtttagtgtcaaaatggcggcgagtagaagcactttacctctgatgaagtacttgagagtgcgcgtggacgctcttcctcgcaacactcccttgaccctcgcctccaacttgttgattcgccgcttctccgaagaggttaggggttgttttctcgacaagtccg

SEQ ID NO: 11583 - DNA, 145 bp, Glycine max
  Clone ID: 701064627H1
tgagtgggttcggtggaaccaaagcgtgcttcctcttgctcctatcctaagtcctaattcagcatcgtgctgttccaattcgaaactcatatatataaatacagatcccaactcaaaagccaaatcacaattccacacaacatac

SEQ ID NO: 11584 - DNA, 150 bp, Glycine max
  Clone ID: 701064628H1
ctaaaagacaacccagagagcgcgtcttaataaacgctcttctctgaaaacccccatttcttttcttctttcttcttctctttcgcttcttcgatcttcgatcttcgtcgctgaaaatgagagagtgcatttcaatccacatcggccagg

SEQ ID NO: 11585 - DNA, 159 bp, Glycine max
  Clone ID: 701064629H1
gcacgttctatcctaaagaagacatcaacaatgggaatctgcagacatatgggtacccaaccaagggtacaaataaggctaggaggaaacagagctacactttttgtatatgctatggaagggctagagaacatggcttttgttgccaatgctgtgagc

SEQ ID NO: 11586 - DNA, 153 bp, Glycine max
  Clone ID: 701064630H1
ttcattgattcctgtgcagtatgtatgaatgatagcagcatacttcaaaatgtgtaacaagctgctgcttactgatattctttccgggatactgccttgtacaaaattttgttctctctagttttacactatagtatgataggcactttatgt

SEQ ID NO: 11587 - DNA, 157 bp, Glycine max
  Clone ID: 701064631H1
ctagttctagatcgcgagccgcgcccctttttttttttctcggatctatatacatagagaagaaggaaaaaaacagtagcagatgacagatttaagagagacagagagagcgtgtgtgaggttttagattgagagagagagagagagagagagattg

SEQ ID NO: 11588 - DNA, 117 bp, Glycine max
  Clone ID: 701064632H1
gtttgattgccatcttcggcttttaatttttgcagaaatattttgtgtttggggatgttagaatttgcaattttgtctttgtttatgcactgattatagtattaatgactagtttct

SEQ ID NO: 11589 - DNA, 166 bp, Glycine max
  Clone ID: 701064633H1
cgttcatctaccatgacccttcaagctgattcagcaccagtaccaccaccgccaccggattccgcagccaccaacggcctctcccccaccgcagaggaagccccacaaccaccgtcatcaacaccgccgcatccaaccccacctccagaactgcgcgtcccatatg

SEQ ID NO: 11590 - DNA, 162 bp, Glycine max
  Clone ID: 701064634H1
tgatcgagataactagaaacagtgtgatgaaaatgaaggtccttgttttcttcgttgctacaactttcgtagcatggcaatgccatgcgtacgatatgttccctctccgaatgaacactggctatggtgcccgtactccggaggtgaaatgcgcaagttgga

SEQ ID NO: 11591 - DNA, 167 bp, Glycine max
  Clone ID: 701064635H1
cgctccatctttctctggttctgttgttgcctaagaatgggaggaaattccagtttcagggatgaatataccttcggtatgttctcccaactcctcttatcacctatttttttttttattactaccattattaagggtttactttcttatctgagacttgattgatt

SEQ ID NO: 11592 - DNA, 167 bp, Glycine max
  Clone ID: 701064637H1
tctgtctttgatctgcacacacaacatccctctttaacattgagggttaaaataaaaaacatgaagaaatttgtactcaggttagatttgccagatgacaaggcaaagcagaaggccctgaaaacagtttcatcactttcagggattgatgccatctctatggatat

SEQ ID NO: 11593 - DNA, 162 bp, Glycine max
  Clone ID: 701064639H1
gtgagctataagctagtttatcgtgaggtgaatatgaagttgtttgtcttctttgttgctgcagtagttttggtagcatggccatgccatggcgcaggctaccaaaggttccctctccgaatgaaaactggctatggtgagcgttcttcggaggtaaaatgc

SEQ ID NO: 11594 - DNA, 163 bp, Glycine max
  Clone ID: 701064640H1
gtgaaacaacagctttcatggttccattggtggctggtgatggaaccaaaactcaggcacttgctatttgccactcaaatacttctggaatgaatcatcaaatgcttcatcaacttatgggagttacttcctggaactaaccctgtttgccatttccttggaa

SEQ ID NO: 11595 - DNA, 164 bp, Glycine max
  Clone ID: 701064641H1
atcacaggcgcatagcgtgatccattgacgaagatggtgcagcgtctcacctaccgcaagatgcacagctatgccaccaaatccaaccaacacagggtcgtcaaaacccctggtgggaagctcgtttatcagaccaccaagaagatggccagctggcccaagtg

SEQ ID NO: 11596 - DNA, 162 bp, Glycine max
  Clone ID: 701064642H1
cccggccatctggcgcgtgtggccattgccgtaagtctctcgaaggttcaccgtgcggcgtcctacgtctccaacctcacgcgcgacgccgactacggcggaagcacgcgcgccgctcttgctctgcacgactgcttctcgaatctgggcgacgccgtggac

SEQ ID NO: 11597 - DNA, 166 bp, Glycine max
  Clone ID: 701064644H1
ccaaatcctgaacctcaacaacctgcggcatcaccatctgctggattatcaacagtatcacccctgtaatccgcgtcgatcacgcccgctcccacatcagtgtcattccaacaaactaacatttgcacaaaacacgccaacccgagtgaagatctaaacaagcaat

SEQ ID NO: 11598 - DNA, 166 bp, Glycine max
  Clone ID: 701064645H1
gctccttcttctctaaacactcatctatgactacctttccctcccctccttcaccatcttcttcttcttcaattccttctccaagatctagcatgttttactatgctggaagtgaagatcactctgaggagcctcacttcctccaagcttgttttctttgcagaaa

SEQ ID NO: 11599 - DNA, 168 bp, Glycine max
  Clone ID: 701064646H1
tgggcctaggaatccaaaaaccctcaagacgagtagagggaacgaatgaatagaagaaatcatcgtatcgtatctgcaacaatttctaatttcgggcttcactgtttagtgtaactctcaagccatgtctccgggtcccgttcttgacgccggcgccgaccaacaaat

SEQ ID NO: 11600 - DNA, 102 bp, Glycine max
  Clone ID: 701064647H1
cttaatcttaatctgttagctagcttcaaatgcgttattgggtctcacaaaaaggagctagctaggaagtgaatactactattatttacctgccacacaaca

SEQ ID NO: 11601 - DNA, 170 bp, Glycine max
  Clone ID: 701064648H1
ctagtttccacactgcataccttaggtcttccgaattcgaagttaatttgcaagatggctaaggaaaaggctcagatcaacattgtggtggttggtcatgtggaccctgaggaggcaaccaccattaacgagctgaagaagcctgttgtggagaaagaagctccagggca

SEQ ID NO: 11602 - DNA, 115 bp, Glycine max
  Clone ID: 701064649H1
ctcaacaaaaagaaagaatcccaggcgaggagaaagatggaggggaaggagcaggatgtgtcgttgggagcgaacaagttccccgagagacagccgattgggacggcggcgcaga

SEQ ID NO: 11603 - DNA, 166 bp, Glycine max
  Clone ID: 701064650H1
ctacactaactaaagccgagcagcgagacacagaaaccctagcaacaatgccggctggtcacggtttgagatcccgcaccagacattccttctctcgtcccttcaggaagaagggtaccatcgccctcaccacatacctcataacctaccacgtcggcgattatgt

SEQ ID NO: 11604 - DNA, 99 bp, Glycine max
  Clone ID: 701064652H1
atttcaattgttccgagatcaaccttggatcaggtttagggaatggctgcgatcttagctcgaaaatcactccttgctcttcgtgcgcgccaattggct

SEQ ID NO: 11605 - DNA, 155 bp, Glycine max
  Clone ID: 701064653H1
cttaactagaaacagtgtgatgaaaatgaaggtccttgttttcttcgttgctacaattttcgtagcatggcaatgccatgcgtacgatatgttccctgtccgaatgaacactgggtatggtgcacgtactccggatgtgagatgcgcaagttgga

SEQ ID NO: 11606 - DNA, 161 bp, Glycine max
  Clone ID: 701064654H1
ctgtttgtaagataaagataaaagaggcgcaagatgagtggtagggtttctgggaaggtgaagtggttcaacgatcagaaggggtttggattcataacccctgacgatggcagcgaggaactcttcgttcaccaatctcagatcaaatctgacggtttccg

SEQ ID NO: 11607 - DNA, 157 bp, Glycine max
  Clone ID: 701064656H1
gttataagctagtttatcgtgaagagaatatgaagttgtttgttttctttgttgctgcagtagttttggtagcatggccatgccatggcgcaggctaccaaaggttccctctccgaatgaaaactggctatggtgagcgttcttcggaggtaaaatg

SEQ ID NO: 11608 - DNA, 160 bp, Glycine max
  Clone ID: 701064657H1
cagagagtggtttcagtgagtgatcggtgttcacttgatccttcataagtcgtcatcatcatcatcatcatcaccgttgattgaagaagatgccgatcagaaacatcgccatcggaaggcctgaagaggctactcaccccgacacgttgaaggcggggtt

SEQ ID NO: 11609 - DNA, 66 bp, Glycine max
  Clone ID: 701064658H1
ctaaattcacgatggaggaccatgacgaccaaactcacccacttctcacgcggcgacaccacacaa

SEQ ID NO: 11610 - DNA, 125 bp, Glycine max
  Clone ID: 701064659H1
ccgcgcgagttggttcggctatcgttaaacgtgcttgatcgtgcggttccgcgaagttctaagtcccgggtctgctgtatcaattcgaggctgcacatatataagtacagatcccaggtcaacag

SEQ ID NO: 11611 - DNA, 165 bp, Glycine max
  Clone ID: 701064660H1
cacctttccttttttcccacagaaaaaaacaccacctttctttttccgactaaaggttcgccggaaaatgcctctatcctcctcttcctcctccgccgtagactccgccgtctccggcgagatcatgctctttggcgttagagtcgtggtggactccatccggaa

SEQ ID NO: 11612 - DNA, 164 bp, Glycine max
  Clone ID: 701064662H1
gtctcaaacctcttcgttccttcgattcattccacttcttccaaaatgggcatagactcagttcgcgttctcgtcactggagccgcatgaaaattggatatgctcttgtccctatgattgctaggggcatgatgctgggtcctgaccagaccgtgatcctccac

SEQ ID NO: 11613 - DNA, 169 bp, Glycine max
  Clone ID: 701064664H1
ctagataactagaaacagtgtgatgaaaatgaaggtccttgttttcttcgttgctacaattttcgtagcatggcaatgccatgcgtacgatatgttccctctccgaatgaacactggctatggtgcccgtactccggaggtgaaatgcgcaagttggaggcttgctgtg

SEQ ID NO: 11614 - DNA, 165 bp, Glycine max
  Clone ID: 701064665H1
ctcgaacaatttagatcagactctaaaacagttaaccaacaagctttcttttatgctagtgaacgcgaagtccatcacaacgacatatttatattcggcatagataacaccgtactctctaatatcccatactatgaaaaacatggatatggggtggaggaattt

SEQ ID NO: 11615 - DNA, 162 bp, Glycine max
  Clone ID: 701064666H1
ctcggagctgtctgtgcaaatttgcgttgttcttcgcggcacacctcactcactgaacggtaagtatggcggacaaggctgttacaatccgaacccgaaagttcatgaccaacaggcttctttccaggaagcagtttgtcgttgatgtccttcatccaggga

SEQ ID NO: 11616 - DNA, 126 bp, Glycine max
  Clone ID: 701064667H1
atccctcttttttctctctcttgccatacctatttgtcaatacttccgtctcatttcagtatgcgtgagaggcttcacatccagggtggtcaatggggcgtccatatcggcgccatgttcccggag

SEQ ID NO: 11617 - DNA, 159 bp, Glycine max
  Clone ID: 701064669H1
tatctatgtaggttgttaaggtgtatgtttctgtttttggagatgtaagacgtaaagaagtcgccattgccggcttgaaatctaaggctaaatatgttcgcagcgagttgggcaagcgtatcaagttgcgcttaactcctgagatacgctttcttgagg

SEQ ID NO: 11618 - DNA, 149 bp, Glycine max
  Clone ID: 701064670H1
gagacaatgaaattaaatatacattttatatcacatgtaagaatcaatagtaacagaaagatactggggaagctccgaaaggcttctaactttgtccataatactatcatgaatcacacctttcaacttctcagtgcaaattgtgagct

SEQ ID NO: 11619 - DNA, 158 bp, Glycine max
  Clone ID: 701064671H1
cgtggaaattgctatgctatgctaagctaagctggaaagacaaaaggccctctgagtgagtgagagtgtgtggttaaagaggagaggaagaagagaagaggaggcggtgcgcaccttagcatggattcctctccgtcatcttctctctcctctctcgc

SEQ ID NO: 11620 - DNA, 157 bp, Glycine max
  Clone ID: 701064672H1
ctcgttgtcaatttcgcctctttctttctcaactcccttagattctctccatcgggtcttcaaaaatgcggatgagctgcaatggatgtcgagttctcagaaaaggttgcagtgaaaattgcagcatcagaccctgtttacaatggatcaaaagccc

SEQ ID NO: 11621 - DNA, 159 bp, Glycine max
  Clone ID: 701064673H1
cctcgagccgaatcggctcgagtgccccttagcgaaaccactggcttctcttaaagccaaatagctctatattatttgtccaatctctatacaattgtgaagtcatagactaaaaaaacgtggccttccaatcttctgcagccaataaattagctaatt

SEQ ID NO: 11622 - DNA, 159 bp, Glycine max
  Clone ID: 701064674H1
ttagcttgtaacttggtgcattgactcaccatctttgctttgaatcgccatggaagataaactagcaacaacaagtgaaggacaacccataagatgtaaaggtgtgccatgccatgattcatgaaaaacaacaaattttatatgctcttttttattatt

SEQ ID NO: 11623 - DNA, 159 bp, Glycine max
  Clone ID: 701064675H1
ctaaaatgtggaagagaacggtctttgaagaagaagcagttcaattgatcaactcagatttcagggacctaagtctagctgctaatagactcgcccatcatgccatcaaacttggtggcattggctttggagcctcttttttctgattgtttgctgcca

SEQ ID NO: 11624 - DNA, 176 bp, Glycine max
  Clone ID: 701064676H1
gtaggaattggggtcgaggttgggaatgcagatgaatcaggggtttgtgaatggtgtttgatggtgagagaaagagtggggaaatcgctgaagtgtaattgatgttgtagagtagggtgatagtaagtatctcataaggtgtaagttaaaggttagtagtcgtgaagttgtaaacg

SEQ ID NO: 11625 - DNA, 163 bp, Glycine max
  Clone ID: 701064677H1
gtttgttgatcgagataactagaaacagtgtgatgaaaatgaaggtccttgttttcttcgttgctacaattttggtagcatggcaatgccatgcgtacgatatgttccctctccgaatgaacactggctatggtgcccgtactccggaggtgaaatgcgcaag

SEQ ID NO: 11626 - DNA, 168 bp, Glycine max
  Clone ID: 701064680H1
atatataacaaataatttgtactttcatcaaaacaaaatcccgttgtatttttctcagatggctcgaacgaagcaaacggcccgcaagtccaccggcggcaaggcgccgcggaagcagctggcgactaaggcggctcgcaagtcggctccggcgaccggcggcgtgaa

SEQ ID NO: 11627 - DNA, 162 bp, Glycine max
  Clone ID: 701064681H1
cctttatccttatctcctctcttcttcatttgttctgctcttcccctctatttaaagctcacacaaagggatcatataccttggttgcactttggtaaggtgagacaataggaaaaaggtctatatggcatttgcacgaacaactcagaagtgcatggcttg

SEQ ID NO: 11628 - DNA, 162 bp, Glycine max
  Clone ID: 701064682H1
cagaaaccagtgactgacttttcgagaaagaaaaacaaaaatgagtttccgtcattccatcatgaacgctcttcccattctcctcttcttcctcttcgtttctgcattagtttctgcgaagaaaactggtgatgtgacggagctgcaaattggcgtgaagca

SEQ ID NO: 11629 - DNA, 159 bp, Glycine max
  Clone ID: 701064683H1
cagttctgccaaatcaagaggggttttaagatcatagtgtgtgttttgcaacaatggctaagttctttgctgctatgatcttggcactctttgccatttccatacttcaaacagtggtaatggctgctaatgaacaaggaggccacttgtatgacaaca

SEQ ID NO: 11630 - DNA, 159 bp, Glycine max
  Clone ID: 701064684H1
atgaatctggagaagaatcagaagaggaaacttctaagacaaaaggaacacaaggagttattgagattgacaatcctaacttggtaaagccaaagagcttgaaagctagagatgttgatgttggaaaaacgacagaactttcaaggcgtgaaagacagg

SEQ ID NO: 11631 - DNA, 157 bp, Glycine max
  Clone ID: 701064685H1
ttaaagtcacttactgcgataagaaggcagactatcctgtgaaggtgtctggagttgaaatatcaccagaccctgtggagagtggcaagcctgctacctttaagatctcggctacttctagtaaagctatttatggtggagaagttgtaattggagc

SEQ ID NO: 11632 - DNA, 156 bp, Glycine max
  Clone ID: 701064686H1
ctcgagccggtagaaactcgaaaggaatcagtgtttgtgtgtttcgcatattcttctccgttttagatttgagagagaagaagaaagagaaaattggataagatagttttcgttttcggcgaagaattgaaatctgagtgaacgatgggagtccca

SEQ ID NO: 11633 - DNA, 154 bp, Glycine max
  Clone ID: 701064687H1
ctcgatcttttctattccctcaccaacgtaccgttgttcaatttcaatttcaatttctcggcagccattgccatgttctttcacggctcaagtgagaagaagagggaaagggaaagtggtactgagcatggaggcaggcattggagtgatgggc

SEQ ID NO: 11634 - DNA, 157 bp, Glycine max
  Clone ID: 701064688H1
ctgagcttaatcgtattcctcacttcggctgcttggcaatccaagccaaaagatcctgcagacgtcataagaaaatcttatgaagaaggatatgataactaatgttaccgagtatgaggcaattgcaaaggaaaaattgccaaagatggtttatgac

SEQ ID NO: 11635 - DNA, 156 bp, Glycine max
  Clone ID: 701064689H1
cctttatccttatctcctctcttcttcatttgttctgctcttcccctctatttaaagctcacacaaagggatcatataccttggttgcactttggtaaggtgagagaataggaaaaagggaaatatggcatttgcaggaacaactcagaagtgcat

SEQ ID NO: 11636 - DNA, 157 bp, Glycine max
  Clone ID: 701064690H1
ttcacattctgtaacataggatatcttgtatagggttgaatttgggagggagcttccctgtttcttgatatcttgttcatgcatttgtttctcttggttaattgctttatcaattgtgttgtgatctttttagctgtaccacaaaattctatacctg

SEQ ID NO: 11637 - DNA, 138 bp, Glycine max
  Clone ID: 701064691H1
atcagttgtgtatgcttaaggaatctggttccttcagtttcacatttatttaaaaccaggaactgtagttaagcaacaaaggggtcgttagatagagataatgttgggaattcctctggaagtacattgcttgtcact

SEQ ID NO: 11638 - DNA, 162 bp, Glycine max
  Clone ID: 701064693H1
gttagtgttcttccacccccgtaccgtctctgcctctctgcaatccacagccgaaaatgcctttcaagaggtacgttgagatcgggagggttgctcaaatcaactacggcaaggaatatggcaggctcgtcgtcatcgtcgacgtcattgaccagaacagag

SEQ ID NO: 11639 - DNA, 163 bp, Glycine max
  Clone ID: 701064694H1
cgcatacacatctccccaggctttcacgctcgtctctcagttttattcgaatcccactctcaatcacctttccaaatggccagcgcagtggttgcacaggagaccccaacaacagttccagaagatgagacaactcaggcaatcaagacccaggaaacaaccc

SEQ ID NO: 11640 - DNA, 162 bp, Glycine max
  Clone ID: 701064695H1
ctgcaacctgacagcctccaaatccaatggcttcagagaagaaactttcgaacccaatgagggagatacaagtgcagaagctcgtcctcaatatctctgttggcgagagtggagatcgtctcaccagagccgccaaggtgttggaacaacttagtggccaaa

SEQ ID NO: 11641 - DNA, 166 bp, Glycine max
  Clone ID: 701064696H1
atcagtcacacaaaggaaaacatgaacctgatgttggtcatagtctgagtgacaacatatccttaagacataaaggagtgtcatctggatttattgcatctggtagcagcttggaaaatggatataatcagggatttcattctgcgacacagctacctgcttttat

SEQ ID NO: 11642 - DNA, 288 bp, Glycine max
  Clone ID: 701064701H1
ccgtgtgtgtgttgcgagacacagagacaacgaccccagacgcctccactctttctttggcggcggcgtcgttttctctacgctttacccattcattcattcattctcaggttcggggcatttcattctgattcactatggccaatggtccagcaccgttctctgagattgggaaaagggcaaaagaccttttatacaaggattacaacttcgatcacaagtttagcctctcaattccaaactccactggattggggcttatagcaacaggattgaagaaggataaac

SEQ ID NO: 11643 - DNA, 288 bp, Glycine max
  Clone ID: 701064702H1
ccttccttcatacagatttagcagatgcagtaatagaagctctcccatcagcaacagcaatatatgcaccgaccagaacctctgaagatgttgatcatgacccagttagatattttatcaagatgttctttggttcaatcttggcattcatcttgttcttgtcacccaaaatgatcacggcattcaggaatcatgtcatttagaagaattaaatcctgcttgctgaattcaatctgcaagcatatagatgaagcctattgatagcaacaaagtatactttgatttttt

SEQ ID NO: 11644 - DNA, 284 bp, Glycine max
  Clone ID: 701064703H1
tccatctcataccttcctcaaaggtctcatgggtcgccagaacagaacaccaaccattgttgtagtctggtccattcttcttgcatccattttctctctgctgtgggtccgaatcgacccgtttacgacaagagtcactggtcctgatgttgagcagtgtggaatcaactgctagagaaataaaagctggcagattgaacaacagctttccactcacctgtgtcaaccaacaacataagcctgatggaatgttgtgtttgtcttccaattcttttgtttacaga

SEQ ID NO: 11645 - DNA, 284 bp, Glycine max
  unsure at all n locations
  Clone ID: 701064704H1
ctggtaagccnacagagtacagacatcatttaggaagcagaatcagatatttgaaggttagaacgaaaaagaatcatcgatggcagagacgaaagaaggttcaggttcggagatgtctctgaaggatcagggcaacgagtttttcaagtcaggaaagtatctcaaagctgctgcactctacactcaagccatcacgctagacccttctaaccctaccctctatagtaatcgtgctgcagcactactgcaattggataagcttactacagctctagatgatgcag

SEQ ID NO: 11646 - DNA, 283 bp, Glycine max
  Clone ID: 701064705H1
tctctctctcctctctctctgattctagtcctttaattaatacggtctttctgtatcttgatatgtacatgcatgagataaattgaaaaacagaaaactcgtttaacctataattctttcacacataaattcctttcccaattctctgtaaccaataaaatttctgggtgtcttttattattttgattcataacttgatctatctgtaatctagtctttattgggcgaacgagtgaattttggttgataagctcttcaaactttggtttgaattcgttcagag

SEQ ID NO: 11647 - DNA, 282 bp, Glycine max
  Clone ID: 701064706H1
cagcttgctatgagtttccacattgcataccttaggtcttccgaattcgaagttaatttgcaagatgggttatgaaaaggctcagatcaacattgtggtggttggtcatgtggaccctgaggaggcaaccaccattaacgagctgaagaagcctgttgtggagaaagaagctccagggcatgccatatgagggcatgcacgcacggcctcggaggggaaccagaaaattatgttaacaaaataatctggaaccctaatgtatcagtgtcatcatcagtgtgt

SEQ ID NO: 11648 - DNA, 278 bp, Glycine max
  Clone ID: 701064707H1
cttacttctggttttcattgcttacagagtgcctctacctttcaaagagcatattcatatcagcccttgaccttgtctctggagccaagccaactgagacttcaatcctgatctgaagggtcttttttctttctttggttttgattttgaaccccactttccacatttgcatcttgtttggaatcctagaacatcttggtttggttgttgtcagatttgtgttgagagggtcgagaattggttcatatgagggaaggaggagggggtttgtgggtcaa

SEQ ID NO: 11649 - DNA, 104 bp, Glycine max
  Clone ID: 701064708H1
tggtatatgaactttttattcaacatccaattagtcctctctcaacggatcgacccattttggaataaaatattatatctttggttgaacgaaaagaaacaaaa

SEQ ID NO: 11650 - DNA, 284 bp, Glycine max
  Clone ID: 701064709H1
aagggtttctcttctctttctctgtctgcttcttcactttctctcgtttcaatcgaaaaaaatcatgggcagaaaattcttcgtcggtggcaactggaaatgcaattgggacactgaggaggtgaagaagattgttactactttaaatgaagctaaagtccctggagaagatgttgtagaagttgttgtgagccctccttttgtgttccttccttttgtaaaacgtttgctgcgccctgatttccatgtctcggcccaaaattgttgggttcgcaaaggtggtg

SEQ ID NO: 11651 - DNA, 282 bp, Glycine max
  Clone ID: 701064710H1
gccagttgggcaggtcttcttggtgctggggcagacagaatggagcaatcatattcatgggagaactgggctcttgacaaggaaatgggggaggatgaggaggagttccttcgcgacatccttagtaaaccggctttttcttccgagagtgaaagtcaagcaccagttgtctcatgctctgccaaaagcaaaagggctccgatgacatacattttgtcttttgataactccaccataacaccagcaccttcttccccccccaccctagaggcccaacctgga

SEQ ID NO: 11652 - DNA, 282 bp, Glycine max
  Clone ID: 701064711H1
gtggcgacaatgcgactcctgctaggaagaggctgatgagagacttcaagaggctgcaacaagacccgcctgcagggatcagtggtgccccccaggataacaacataatgctgtggaatgctgtcatatttggtcctgatgatactccatgggatggaggcacgttcaagttgacactccaatttactgaggactatccaaataaaccaccgactgtacgatttgtgtctcgcatgtttcatccaaatatttatgctgatggaagtatttgtttggatatat

SEQ ID NO: 11653 - DNA, 283 bp, Glycine max
  Clone ID: 701064712H1
ctctgctcgtgctctagggttatcatatctccatttccatttcctctctctcagtttccaagaatcctaagctatgggaaagtcttacccaaccgtgagcgctgattaccagaaggccgttgagaaggcgaagaagaagcccagaggcttcatcgctgagaagagatgcgctcctctaatgctccgtttggcatggcactctgctggaacttacgacgtgagctcgaagaccggtggtcccttcggaaccataaagcacccctccgaactcgctcacggcgct

SEQ ID NO: 11654 - DNA, 280 bp, Glycine max
  Clone ID: 701064713H1
tgcaaaagagcgcgtagtcgcaaccctaatcagaagaagcgcagttcaagcgagtgacagccaccagccatgggtcgtatgcacagccgcggtaagggtatatcctcttctgctttgccctacaaaaggacacctcctagctggctcaagatctcttcgcaagatgtcgaagaaaatatctgcaagttcgcgaagaaaggtttgaccccgtctcagattggtgtcattctcagagattctcacggtattgctcaggtcaatagcgtcactggcagcaaaa

SEQ ID NO: 11655 - DNA, 273 bp, Glycine max
  unsure at all n locations
  Clone ID: 701064715H1
ccaaggttggtgtgctacagagactgagcttgaggatcggaagctccgaatagaggatgccaagaatgcaacttttgctgccattgaggaaggtattgtacctgggngccgcactgcactggttcatctcactactcatgtcgcagcaatcaaggacaagcttgaggatgcagatgagaggctaggagctgacattgtgcagtaggcactgatagctcctgcagcattgattgctcanaatgctggactagcaggtgacgttcgtgtggagaa

SEQ ID NO: 11656 - DNA, 286 bp, Glycine max
  Clone ID: 701064716H1
ctcgagccgctcagccgagaaaaccctaattcgctcgcagtcacccaagaggcgaatccttcccattgctcgagatgggtgaagaagtgaaggccgtggttccagagtctgttttgaagaagcagaagagagaggaggaatgggcgttggccaagaagcaagacctcgaggctgcgaagaagaagagagccgagagccgcaaactcatctacaacagagctaagcagtacgctaaggagtacgatcaccaggagaaggaattgattcggttgaaacgcgaggccaa

SEQ ID NO: 11657 - DNA, 296 bp, Glycine max
  Clone ID: 701064717H1
tcggtcgagttgcagatggatccactacccccaagtactctaaggctaggtatgatgaaatcgtgaaggaagtctcttcttacttgaagaaggttggttacaacccagacaagattccctttgttcccatctctggttttgagggtgacaacatgattgagaggtccaccaaccttgactggtcaaagggaccaactctccttgaggctcttgacgcaatcaatgagaccaagaggccctccgacaagcctctaaggcttccattgcaggatgtctacaagattggtggtattggt

SEQ ID NO: 11658 - DNA, 283 bp, Glycine max
  Clone ID: 701064720H1
cggcaaacagattggtgtttaccacgaccacttctacatttaccttcttgtccttgacattgatggtgttgccaactcttttgagacgacaagtttgaagactgtaagagtgacagatggaagttcgaagaggaaattctattggacaactgaggttgaaactgccaacactgaaaatgatgcaaagataatacttgggttgagccctggtgagctttcagtggtgaatcctaacaagaaaacctctgatggaaatgatgtgggataccgattgattccagca

SEQ ID NO: 11659 - DNA, 278 bp, Glycine max
  Clone ID: 701064721H1
ctggcgcactccctgaggcttctcttctcttctcttctctgtcgtgagtcaccatggtgagggttagtgtgctgaacgatgctctgaagagcatgtacaatgctgagaaaaggggaaagcgccaagtcatgattaggccatcctccaaagtcattatcaaattccctttggtgatgcaaaagcacggatacatcggagagtttgagtacgttgatgaccacagggctggtaaaatcgtggttgaattgaacggtagactgaacaagtgtggggttatt

SEQ ID NO: 11660 - DNA, 255 bp, Glycine max
  Clone ID: 701064722H1
ctgaacctcaacttcctaattccccagttcttacaacttgtctatctatagagttctctcttgtttcccttgtactgtgacgttacatgccactggttatgtcctaactagtagataggactttaaacccagaaacgaaggctttaaaatagtgacaatactacattccagtttcccctattttatttctttggggattgtttacctgtttgctcattattaccggaaaaagaaacaaataaactttacatcatt

SEQ ID NO: 11661 - DNA, 173 bp, Glycine max
  unsure at all n locations
  Clone ID: 701064724H1
cttcgttgaagtcaacgttctaaacaaacactcccatctcttctctggctcaatggaggtcctggatgttcatctcttggctatggagcaatgcaagaacttggaccttttcgagtaaacagtgatggtaaaacactccacagaaatatacanccctggaanacagttgcaaa

SEQ ID NO: 11662 - DNA, 156 bp, Glycine max
  Clone ID: 701064725H1
ctctaaggatattcggctcttgcatcgatgaagaacgtagcgaaatgcgatacttggtgtgaattgcagaatcccgtgaaccatcgagtctttgaacgcaagttgcgcccgaagccattaggtcgagggcacgcctgcctgggtgtcacacatcgt

SEQ ID NO: 11663 - DNA, 282 bp, Glycine max
  Clone ID: 701064726H1
caagggtttaactttctggctgtgttaatatgcgtttcagcactgtcactgagttcttctgttgcgggggaagggctaaatatcggccttgttatgaacttctacaaggaatcatgccctcaggctgaagacatcatcacagaacaagtcaagcttctctacaagcgccacaagaacactgctttgctctggctcaggaacatcttccatgactgtgctgttcagagttgtgatgcttcactgttgctggactccacaagaaggcgcttgcctgagaaggaa

SEQ ID NO: 11664 - DNA, 102 bp, Glycine max
  Clone ID: 701064727H1
caagactttccgtgcatgcaaagcatatacgcattatattactagtcctaatttgtcttgtcgtttgcctctttctatgattaatgatgatcagctttaagg

SEQ ID NO: 11665 - DNA, 277 bp, Glycine max
  Clone ID: 701064728H1
cgcggagataggggtgagaatggagagcaaagaggaagatgtaagggttggagcaactaagttctcagaaaggcaaccaattggtacagcagctcagggtgacaaggactacaaagaaccacccccagcacctttgtttgagcctggtgagctaaagtcatggtccttctacagagctggacttgctgagtttgtggccactttcttgttcctctacattaccatcttaactgtcatgggtgtcaacaggtcaccctccaagtgtgcctctgttggc

SEQ ID NO: 11666 - DNA, 278 bp, Glycine max
  Clone ID: 701064730H1
ttcaggtactgctttcggatgcagatacagatcgctcgtacgattcaaaccgctcgtaagtcgacaggaggtaaggcttctaggaacgaagttgcaaccaaggctgcacgtaagtctgacccaactactggtggtgtgaagaagccccaccgttagcgttctggtaccgttgatcttcgtgagattatgaaattccagaagagtaccgagcttttgatccggaagctccccttccagaggctggttcgtgaaattgctcaggacttcaagactgatct

SEQ ID NO: 11667 - DNA, 273 bp, Glycine max
  Clone ID: 701064732H1
aacagtggatgaaaatgaaggtccttgttttcttcgttgctacaattttggtagcatggcaatgccatgcgtacgatatgttccctctccgaatgaacactggctatggtgcccgtactccggaggtgaaatgcgcaagttggaggcttgctgtggaagcacacaacatctttggctttgagaccattcctgaagagtgcgttgaagcaacaaaggaatacgtccatggcgaacaatatagatcagactccaaaacagttaaccaacaagctt

SEQ ID NO: 11668 - DNA, 287 bp, Glycine max
  Clone ID: 701064733H1
cgttttgcgacggaggagggtgtgggtttcaactttcaattcagaacgaacgattccttcatttcccgagtgattcaccgatctgataatcgattgaatttagggtttgggagatggcgtcgagtgtgttgaagagcctcctcctgagattttcctcatcgaggaacacgacgaccaccagaagtttcagcctcgttacccctcaaatcagcaaccacaccgccaagtggatgcagactaaatgaatgaacagggttgaatagtggggatcaatttcaacgatgtga

SEQ ID NO: 11669 - DNA, 276 bp, Glycine max
  Clone ID: 701064734H1
ccttgggattacctgaaagataaaagcaaagagttttctatattggtagatagagctgtggggggctccagcatcatagatgggcaattggagctaatggttcataggaggttacttcaggatgattcccgaggtgttgcagaggcactgaatgaaacagtttgcatccatgataagtgcaccgggttaactgtgctagggaagtactatttcagaattgatcctgtaggagagggtgccagatggcgtcgatcatttggtcaggagatatactca

SEQ ID NO: 11670 - DNA, 277 bp, Glycine max
  Clone ID: 701064737H1
caggtgtgaagtgaacacaatggagagaagggttggctatgaggtgctggtggctttggtgacccttttggttttctcatttgcttgtgccactgcttcatcatcaggaccaacaaaactccaccaccgtgtggagcaattcaggaggaatctgcttgctaatggccttggtagaactcctccaatggggtggaacagttggaatcatttcagctgtcaaattaacgaaaaaatgatcagagaaactgctgatgcccttgtttctactggtctgtcc

SEQ ID NO: 11671 - DNA, 94 bp, Glycine max
  Clone ID: 701064738H1
gctagctcaacgaacgaagtagagtagtgtgctacgaaaaatgtggcggtgcatcgcacgtggtctccgtggacctgcttccaccagatccacc

SEQ ID NO: 11672 - DNA, 272 bp, Glycine max
  Clone ID: 701064739H1
ctcgagcagttttggaacgtgcaagatccggtgctctaatctctgcattctgtgatggctagctaaccgataacgagtcacgtcaccgattcgtggtactccacgctctccgtcttcaccctcgccatcggcctcgtattaatcgcctctttcttcatttatgaagcaacatcttctaggataagtcgttcacttgttcaggagctgacaactggtgcagtggcttcagtcttcttgggtttgggtcttgttctcgtattgttctggtgtta

SEQ ID NO: 11673 - DNA, 275 bp, Glycine max
  Clone ID: 701064740H1
tgtaagagctcaggtttggctgcttctcttgctgtacgtatagatccttttatatgccatgcgtctaccgtaaaccgtctagcatggacgaactatgatgatgatcaaacgagtatgcaacttgcttcatgtggagctgatagatgtgtaagagtgtttgatgtatctgttgagtaattattgtacccctttttttagttatatctgtagaatgatttatattatcctcatagctatggctaagaaaatttgtccctgcttgcattgttcttctc

SEQ ID NO: 11674 - DNA, 281 bp, Glycine max
  Clone ID: 701064741H1
ctctcatctcgtacgttctctcccgtcaacgttggctttctctctctcctcggattttgaaatagaaaagatgacgccggagaatgggaaagagaagaaggattttgatgcagaagcagcagggatgaagagatacaggaatggtgaaatctgggagtttgaggatgacatgggtgtctcagatggtgatggtactggtgtcttgttgggcttggatggtggaaccacctccactgtctgcatttgcatgcccatgattcccttttctcactctcagctcc

SEQ ID NO: 11675 - DNA, 274 bp, Glycine max
  Clone ID: 701064742H1
ctcattaatgcaagactggcacttcgttgcttggtgatgtcccttcctgttctcttcactcttggtcttgcgagagaaagccatgccagacacgaagatttatggcatgctggttggccatacattcccattccaagctcattgcgatatcttctaaagactggctctgtcagtgtcgacatcgatgactaggggctggatattgtagatttacactactcgaaaatctacttctataccgaagattccttccaggcaaaacaatgagagtaca

SEQ ID NO: 11676 - DNA, 282 bp, Glycine max
  Clone ID: 701064748H1
cttcgctactgttaagggctgcactataccagaatgtctcagggaagaggcagtgcatctttgcctattgtggtcactgtggtttcactactgtgccttttggaacgtgctaacgcagcaacttactccgttggaggacctgggggatggaccttcaacactaatgcttggcccaatggaaaaagattcagagctggtgatatcctaatcttcaactatgactcaacctcccacaatgtggttgctgtggacagaagtggatacaacagctgcaagacacca

SEQ ID NO: 11677 - DNA, 93 bp, Glycine max
  Clone ID: 701064749H1
ttttagaggagacacacacactcttccttccttttgttgtctcacaatgatgagtgcaagtgcaagagataggtctccttccacacaacatac

SEQ ID NO: 11678 - DNA, 114 bp, Glycine max
  unsure at all n locations
  Clone ID: 701064750H1
agatgaggcatgatggaatcgttgtttggatgaaaatgtangaattttacccacagagaaagtgatagattagaatgagttcgtccttcggttgatcaggataacagggtgtta

SEQ ID NO: 11679 - DNA, 282 bp, Glycine max
  Clone ID: 701064751H1
agtgcactgaacccttccacggtggtgactgagtgatgacagacaacaagtaagtttcagagctacagcacaagaaacagtctgatttaatacgcttctatgagcgggtgaggtgctgggagtataggtcgcacacttccattgttcgcttgacaaagtcgacccgcactgacgaggctcgtcgcttgggattcaaggctaagcagggctatgtgatataccgtgttcgtgttaggagcggtgagcgaaagacgccagttcccaaaagtattgtttatggga

SEQ ID NO: 11680 - DNA, 280 bp, Glycine max
  Clone ID: 701064754H1
cagttgagaaggaatccatcattgtaatgctagcaactttggacttcagggatgtgtcttcacaaaggatgtcaacaaagcaataatgatcagtgatgcaatggaaacgggaacagttcagataaattctgccccagctcgtgggccagatcattttccctttcagggtataaaggacagtggcattggatctcaagggattaccaacagcataaacatgatgaccaaggtcaaaacgactgtgatcaacttacccagcccttcctatactatgggctag

SEQ ID NO: 11681 - DNA, 276 bp, Glycine max
  Clone ID: 701064755H1
gtagagtaaagaggggttcctagacaagatcaaggacaagatccacggcgaggagggtggcgccaccgccgagggcgagacgaagaagaagaagaaggagacgaagaagcatgaacatggcgatgacagcagctgcagcagtgacagtgattagattatctcccactgctgcatcacctatatatcgtataaggtgtatggcaccatagtagtgagggctgtgtctttcactatttttcctacttgtcatttatatttatgagcgagacaaatagt

SEQ ID NO: 11682 - DNA, 276 bp, Glycine max
  Clone ID: 701064756H1
ctctatgatttgcagttgccgttgcaatcaagagcagcatcatcgttccattcccacgttggaggactaacagtaacattctcaacactgtctcttcgacactcttctcctcttgttctgacacacaacctccacttccaacccaaactcaaacgcgcttccacaaccattcgctgctcctctgcgttgactcctcaattgatgtctaccttggatcaagttattgcttcaaataaagtagttgtgtttatgaagggaactaaagactttccacag

SEQ ID NO: 11683 - DNA, 280 bp, Glycine max
  unsure at all n locations
  Clone ID: 701064757H1
cagacattgggttacccatagtctcatatagtgtcatacagcaaaaaaattcagcaacacaaaacaatgggttctcttatggcaggatggtattctacccacatggatcctcaatcagccacacttagaaggaaccgctcactcactaaggatgaaattgatgcttactggacatcaaagaagaagatagaggaagaacaccttagagctaattccaatgtgtcagagactactcaggctagcanaaacacagagcctgaaaagaagttgcagaagtcaa

SEQ ID NO: 11684 - DNA, 70 bp, Glycine max
  Clone ID: 701064758H1
cgaacaaccgataattgcatcctactggaatcaagtattaaccctcatctcactgaatactctccacaca

SEQ ID NO: 11685 - DNA, 281 bp, Glycine max
  Clone ID: 701064763H1
ctagtttgtgtgagctataagctagtttatcgtgaggtcaatatcaagttgtttgtcttctttgttgctgcagtagttttcgtagcatggccatgccatggcgcaggctaccaaaggttccctctccgaatgacaactggctatggtgagcgttcttcggaggtaaaatgcgcaagttttaggcttgctgtggaagcacacaacatccgagttgctaaaaccattcctgaagagtgcgttgaaccaacaaactactacattaatggcgaacaatttagatc

SEQ ID NO: 11686 - DNA, 232 bp, Glycine max
  Clone ID: 701064764H1
attctgctcgtagtataaaagacattataagttgacagaatcaatggcaagatagctatttaggtccaaagacaagcttatgcttcggaatataaatattacaggggtaaccacacaatacaatcaagctcttcaagcaacaacttgtccacagagctgatttcggatctctggaagctttttacggaacactacatcaagtcgtgcatcaagagtttttccacacaacata

SEQ ID NO: 11687 - DNA, 211 bp, Glycine max
  Clone ID: 701064765H1
ctgggagaccatctctgaaatcactcggttaaaatgctatatttctagctcctagttatttgtttttactttttttaggaagaactaagaaaactcagtcctaaagaggacatgtaattatgttgaatgtggccagctcttggatgaccacatggaatcatacttttccttatttttttcattaaaaaaaaaaaaaaacaaaaaactaaaa

SEQ ID NO: 11688 - DNA, 279 bp, Glycine max
  Clone ID: 701064766H1
ctggcatgtggcagaagtcctaggagtgtaaaaccgagacgcaaaatgaagacgatcttgtcgtctgagaccatgaatattcccgacggcgtgagcatcaaggttcacgctaaggttatcgaggttgagggccctcgtggaaaactcgtgcgagacttccaccatctgaacttggacttccaacttattaccgacgatggcggtaaaaggaagctcaagattgattcttggtttggttctcgtaaaacctccgccgccatccgcaccgccctcagccac

SEQ ID NO: 11689 - DNA, 278 bp, Glycine max
  Clone ID: 701064769H1
cggctgatctcattaattgcaagactggcacttcgttgcttggtgatgtccctttctgttctcttcactcttggtcttgcgagagaaagccatgccagagacgaagatttttggcatgctgtttggccaaacactcccattccaagttcattgcgagattttctaaagcctggccctgcaagtgttgaaatcgatgatcaccctatgtaaattgaagaaacacagtacccgaaaaccttcttctataaagaagaccttcattcaggcgtaacaatgaa

SEQ ID NO: 11690 - DNA, 278 bp, Glycine max
  Clone ID: 701064770H1
gctcggagacaaacctctgtggcaaggttcgttccgccactggagttggggtcatgctcaatgatggaaagagccggttctccattaatgggaagcccatttatcatttcatgggaacatccacttttagtcaatacactgttgttcatgacgttagtgtagctaagattgacccggtagctcccttggagaaagtttgccttcttggatgtggtgtttcaactggacttggagctgtctggaacactgcaaaagtggagtcagggtcaattgttgct

SEQ ID NO: 11691 - DNA, 273 bp, Glycine max
  Clone ID: 701064771H1
taacagctagctattagttcgattttgtagtaagtgaggtgccaatatggtgaagatagctcttggtactttggatgactcttttagcgctgcctctcttaaggcttatttcgcagagttccacgcaactctgattttcgtgttcgctggtgttggatcagccatcgcttacaacgagcttacaaaagatgcagccttggatccaacggggctggtggcagtagctgtggcacatgcatttgcactgtttgtaggtgtctccgtcgccgccaa

SEQ ID NO: 11692 - DNA, 140 bp, Glycine max
  Clone ID: 701064772H1
cttttgtgtgcctcatggctgcaactgcaaccaacaaccctcaaataacaagggaggaaatccaaactgccatagccacagcagtggaattaagggcccttcatgctgcattaacacaaggcagtagtccaggcacaaac

SEQ ID NO: 11693 - DNA, 248 bp, Glycine max
  Clone ID: 701064773H1
ctcagaacagaggaggaggcacccaagcccaagcccaagaatcctcttgatcttcttcctccaagcaagatgatcttggatgactggaaaagactctactcaaacaccaagaccaacttccgcgaggttgcaatcaaaggattttgggacatgtacgatccagagggatattctctgtggttctgtgattacaaatacaatgatgagaacacagtttcctttgttacgttaaacaaggttggtggatt

SEQ ID NO: 11694 - DNA, 278 bp, Glycine max
  Clone ID: 701064774H1
ctcatatcctctctcattctcactataaacacaaaacccttcccatcctaattaaggtgaaaatgaaggcatcacccattgcttggttcactttggtggttgtgtttcttgtggctgaagttcaagtttcaatggcagtcacatgcagcccagtgcagctgagtgcatgtgtaagtgcaataacctcttcaacccctccatcaaacctatgctgttccaggatcaaagaacaggaaacatggcttctgcaataactccagaaccccaatctccagaag

SEQ ID NO: 11695 - DNA, 122 bp, Glycine max
  Clone ID: 701064775H1
ctcagtcctcactcgcagatctttcactcagccaaaaccagactagtccgaggaagtcctctattcagaaccagatatggagacaatacccaccgagatcagcagcggcaagatgttcggag

SEQ ID NO: 11696 - DNA, 275 bp, Glycine max
  Clone ID: 701064777H1
ctttgtgtgagctataagctagtttatcgtgaggtgaatatgaagttgtttgtcttctttgttgctgcagtagttttggtagcatggccatgccatggcgcaggctaccaaaggttccctctccgaatgacaactggctatggtgagcgttcttcggaggtaaaatgcgcaagttttaggcttgctgtggaagcacacaacatccgagccattaaaaccattcctgaagagtgcgttgaaccaacaacggactacattaatggcgaacaatttag

SEQ ID NO: 11697 - DNA, 276 bp, Glycine max
  Clone ID: 701064778H1
cgcaaactggagatgaatctcactctgctcttactgagtttgataggaccgagaaagacattaccccaataggtggtttccctcactatggtgttgttaaggatgattatatcatggtcaagggatgctgcgttggtcccaagaaaagggttattacattgcgccaatccctccttaagcagacttctcgtgttgctctggaggagatcaagctcaagtttatcgacacctcttcaaagtctgggcatggtcgcttccagaccacacaggagaagc

SEQ ID NO: 11698 - DNA, 278 bp, Glycine max
  Clone ID: 701064779H1
ctcacttcaatttcaaggcattcaaaacaaggaaatggagtcactatctcctatgtcaatctacgatggcataaagagctacctgagaaggcggcgctaccggcgtctccacggaggcaccaccgtcgttagaaggaagatggcgatcatccggttgagaggcccacgtaggaattggagggtcagagcaattccaaggcttagatgggtgatgagatcaccattgaagatgttgacaaagctcaagaatgcttacatgaactttatgttgagactgt

SEQ ID NO: 11699 - DNA, 279 bp, Glycine max
  Clone ID: 701064780H1
gttttcacctgaacaatcggagctacatagaccgacatgtggatccgtacggattgggacctattggctatgattggctccaaaaaaacaaaagaaaaatagaaaaaaactataaactctatctgacaaagtcatggactaagattttcaactttttgaagttggacatcaatgaggcagaggctaatgttgcggtcaagttaatgacagacaagctccgttccttcaaccaacactttgatgatatatgcaacgatcagtctacgtggcttgtctttg

SEQ ID NO: 11700 - DNA, 282 bp, Glycine max
  Clone ID: 701064781H1
tttggaacaacgggctagaatccgaggagggtattagcctactgatcagcagaaagctgctgaagctgatgaatggagatgttcgctatctaaggggcgcaggcaaatcagcttttatcctctctgctgaacttgcagcagcccataatttgaaaggttaaaagttttggctaaaagaataaaagatgatgcaaccagcaaaacacaatctgttttgtacatcataaagagaacggagctagccattaattgcatccaatgtaactctaatttgttcccacg

SEQ ID NO: 11701 - DNA, 280 bp, Glycine max
  Clone ID: 701064782H1
cggagcaaggacctacagaaagaccctccaacctcttgcagtgccggtcccgtagcagaagatatgtttcattggcaagcaactataatgggtccccctgatagcccttatgctgggggtgtttttctagttactattcattttcctccggattatccattcaagccacccaaggttgcatttaggactaaagttttccacccaaatatcaacagcaatggtagtatttgtcttgatatcttaaaggagcagtggagcccagcattgacaatctctaagg

SEQ ID NO: 11702 - DNA, 273 bp, Glycine max
  Clone ID: 701064783H1
ctaagcgcggtggaggcggtgcttgctacaactgtggtgaatcgggacatctggctagggattgcagtggaggcggtggtggggacaggtacggatgaggtggtggtggtggcagatatggaggcggcggtggcgggaggtacgttggtggtggaggcggcggcggcggcggaggaagctgctacagctgtggagagtctgggcattttgccagagattgcccatcaagtgctcgttgaatttactgttagggttgtttatgttttgcggatt

SEQ ID NO: 11703 - DNA, 278 bp, Glycine max
  Clone ID: 701064784H1
ctgccgacgccattgacgccattgaaaaccttcgggttctcatttacaagcagtgtttaccagttgtctcatgctcagacatccttgttatcgcagcacgtgaagctgttcgccaattaggaggccctgatcttgacgtgccactgggaagaaaagacggtctaggaccaaacgccaccgcgccggacaacctaccggcaccattcttccgaaccgacgatcttctcagaggattcggaaatagaggtttcgatgccaccgatgtggtcgctctctcc

SEQ ID NO: 11704 - DNA, 275 bp, Glycine max
  Clone ID: 701064785H1
ctctttgatgttgatctcttgggccactgggattgcagaagcccccaagactgatcctgagttttggaagtctttgttccctgttgctgttgcacatacaataggacatgtagcggcaacagttagtatgtcaaaagttgcggtatcgtttacacatattatcaagagtggtgacacctgcttctagtgttctggtttcaagataccttttgggtgagagcttccctgtgcctgtctatctgtctttaattccaatcattggtcgatgtgcactt

SEQ ID NO: 11705 - DNA, 277 bp, Glycine max
  Clone ID: 701064786H1
cctttctctgaagtgaggttgctcagaagcttgtccaacaagaacatcattgcactttacaatgtgtggagggatgagcagcgaaacactttgaatttcatcactgaggtttgcaccagtggaaatttgagggagtacaggaaaaagcacaggcatgtttccataaaggcactcaagaagtggtctaagcagattttgaaagggttgaattatttgcacttgcatgatccctgcatcatccacagagatctcaattccagcaatgtgtttgtcaatg

SEQ ID NO: 11706 - DNA, 273 bp, Glycine max
  Clone ID: 701064787H1
cataatagaaacagtgtgatgaaaatgaaggtccttgttttcttcgttgctacaattttcgtagcatggcaatgccatgcgtacgatatgttccctctccgaatgaacactggctatggtgcccgtactccggaggtgaaatgcgcaagttggaggcttgctgtggaagcacacaacatctttggctttgagaccattcctgaagagtgcgttgaagcaacaaaggaatacatccatggcgaacaatatagatcagactccaaaacagttaac

SEQ ID NO: 11707 - DNA, 275 bp, Glycine max
  Clone ID: 701064788H1
cagttatacaaccagcagcaaccgccggtcggagttccgccgccgcaaggttatccgccggaggggtacggaaaggagggatatccaccgccgggatacccgccagcgggatacccgccagctggatacccaccgccgggatatccgccacaacaaggctatcctccgccgccctacccggcgcaggggtatcctccgccctacgctcctcaatacgctcagcctctgccccgtcaacaaatttcaactggccctggttgtttggaaggctgttt

SEQ ID NO: 11708 - DNA, 277 bp, Glycine max
  Clone ID: 701064789H1
ctataactagtttatcgtgaggagaatatgaagttgtttgtcttctttgttgctgcagtagttttcgtagcatggccatgccatggcgcaggctaccaaaggttccctctccgaatgaaaactggctatggtgagcgttcttcggaggtaaaatgcgcaagttttaggcttgctgtggaagcacacaacatccgagcctttaaaaccattcctgaagagtgcgtcgaaccaacaaaggactacattaatggcgaacaatttagatcagactctaaaa

SEQ ID NO: 11709 - DNA, 277 bp, Glycine max
  Clone ID: 701064790H1
tactacactcatcattgtctcaaaaaccttctctctcaacaaaacctacaacaacaacaaaaaaagagaaattttttacaacaatggaggcatcaaagatgaagtttttcttggttttggtgattgccatgttggcgatggtagcaactggggtttcagctgctgaggcacctgccccaggtccttcatccgatgccaccaccttctttgtacccactgctcttgcttctctctttgttcttgcatttggccttctcttctaattaattcttcaaca

SEQ ID NO: 11710 - DNA, 277 bp, Glycine max
  Clone ID: 701064791H1
gccagtcttctggccttccggctctgcatcaaaaatttgatttgccagctccttttgtattacacactgactgtccacattactggcggtatcatcttccaggtgagacagaggaagaattttcaaccagattagccaataatttggagcagttgattctgaaagagggaccagagactattgctgcatttattgctgaacctgtaatgggggcaggaggtgtaatacctccaccatcaacttattttgagaaggtccaagccgttgtcaagaagta

SEQ ID NO: 11711 - DNA, 273 bp, Glycine max
  Clone ID: 701064792H1
gttggagaggcgaaactcgagagtgtaaggttttgcatttcatttgacgaagagtgagagagtcttatctgtcgtctctgatctctgatcgcatcttcattccgaaaatggctgtttcggctatcactggagcgaggctaactctagggatgtctctttcctcttccacgcgatcacgaatccccgcaatggccgtatctatcgaccccaagaccgataacaaactcactcttaccaagtccgaggaagctttcgctgcggccaaggagctga

SEQ ID NO: 11712 - DNA, 276 bp, Glycine max
  Clone ID: 701064793H1
gtttttcttttcctcattctctcattctcaacaccaccaaaatgggccttgtttcccaggatgccctcaaccaactccaagctctcatggatcaagtgctacttgaggaggagccactgcagagaacgtttcagaatgttcatcaaggatgtgtcgccgaaaccttaacgcggtttctaaaagcaagggagtggaatgctaccaaggcccataaaatgatagtcgattgtttaaagtggagagtacaaaatgagattgacaacatattatctaaac

SEQ ID NO: 11713 - DNA, 276 bp, Glycine max
  Clone ID: 701064794H1
ctaaaaggcacctgcaacactgtctctgtctctcctcctcctgttctcactcagcatcgccgtaaccgttagatcgagcgactacgactacgattgtgtgtacactgcatacgttagaaccggttcggtgttgaagggcggaacggactctaagatcgggctgaagctgtacgacaagtacggctactacatctacattaaaaacctcgaagcatggggcggcttgatgggcaagggctacgactacttcgagcgcggcaacctcgacatcttcag

SEQ ID NO: 11714 - DNA, 280 bp, Glycine max
  Clone ID: 701064795H1
gtaaaaagaaaatcgcaaaggcagagcaagaacacaacacaagacatcgaagcagaagaagacatggggttgcagtggctgattctcacctacgtggtcgcagccgaagctgcggtggcaattctgctaacccttcccacgcccaaactcctgaggaaccgtttcgcctctctcgtttccctcattcttcaacccgcgcttttcattgtatgccttgcagggttccacctcttagatttatactggaaaaatgagcatcgcttgatgtgtacctctgaag

SEQ ID NO: 11715 - DNA, 137 bp, Glycine max
  Clone ID: 701064796H1
aagagaaagaaaacagaggccctcagatgagtggtagggtttctgggcaggtgaagtggttcaacgatcagaaggggtttggattcataacccctgacgatggcagcgaggaactcttcgttcaccaatctcagatc

SEQ ID NO: 11716 - DNA, 279 bp, Glycine max
  Clone ID: 701064801H1
ctctcctccaccaccaccttacaagaagccttacatctatgcatcacctccccctccttaccactattagcatacctcttatcgatatgaagaatatgtgcaacgaataaaagaaagcgatggaaagcgcttcgcgatgcacgaacagagaagaaatggaagcaaagtttccgcgttttgtctttcataaaaaaaatgttaaattattattttctatgatcggattggtttcttgtcttttttctcttgtttaagaatttcggtgtattttaacagttg

SEQ ID NO: 11717 - DNA, 265 bp, Glycine max
  Clone ID: 701064803H1
cgatactttgatcagatccacaacactccttcatccatgacgcttggctcttcaggatccagtgtcgtggttccaaggaacttcagattgctggaggagcttgagaagggagaaaaaggaatcggagatggaacagttagctatggaatggatgatggtgacgacatttacatgcgctcttggactggaaccattattggcccctataatactgtacatgaaggaagaatttatcaattgaagttgttttgtgataaagactacc

SEQ ID NO: 11718 - DNA, 264 bp, Glycine max
  Clone ID: 701064804H1
gagacatcaaatatagagatagaggctctttaggagtgacatattattgctctgtagtgttggacagcatgttggaaggtaaagctgtgatagaggatactgacatgccagataagatgcagatccaagcatggcatccgcttctgaagctttggatctctatgatgtttttgattgcacatccattgctgcccacataaaaaaggagtttgatacacagtatggttctggatggcagtgtgtggtgggatcaagttttgggtg

SEQ ID NO: 11719 - DNA, 261 bp, Glycine max
  Clone ID: 701064805H1
tggggaaatttgcgttgtttttcgcggtacagctcacacacactgaacggtaagtatggcggacaaggctgttacaatccgaacccgaaagttcatgaccaacaggcttctttccaggaagcagtttgtcgttgatgttcttcatccagggagggcaaatgtttccaaggctgaacttaaggagaagctagctaggatgtatgatgtgaaagaccctaatactgtatttgtcttcaaattccgaacacattttggaggtgg

SEQ ID NO: 11720 - DNA, 266 bp, Glycine max
  Clone ID: 701064806H1
cgcatagagagagagagagagagagagagagagagggggggctcttctacacagatttgtttgatttcaattcaagaccaaagaagaatctctcacaaatggcgtcaagaattgttcaacaacaacaagcagaggtgtcgcagtagtagggggaggaaaaccacagaagaagcacggtgttgctgatggaaggcaccgcaaagcattgggtgacattgggaatttggccaatgtaagaggcgttgttgatgccacaccaaatcgcc

SEQ ID NO: 11721 - DNA, 266 bp, Glycine max
  Clone ID: 701064807H1
ctcacaagctcacagagcaagaacactgttccaatacggaatctaaggcaaagcaaaccaaacatcttgaatcatgggttcaacaggtgagactcagattaccccaacccacgtatctgatgaagaagcacaccttttcgccatgcaactagccagtgcttctgtccttccaatgatcctcaaatcagcacttgagcttgatctgttggaaatcatagccaaggctggccctggtgttcatctttcccccactgacatttcttctc

SEQ ID NO: 11722 - DNA, 265 bp, Glycine max
  Clone ID: 701064808H1
gaacgcaacatcatcaacatcacagaggtagagagtaagacgccggcaatgtccgctgtgagagttcaagtttcggcgtgtgcggtttccgccaccgtcaaccaccttcgcctccgccaaaacgccgtcgtttccttcaggaagaagaagcctctcactctcagagtggtctcaatgtcttccgttcctccttcccaacccttcgaaatcgccgttaaagcttccgtcaccacacccaacaggctcggcgactgccctttttgcc

SEQ ID NO: 11723 - DNA, 264 bp, Glycine max
  Clone ID: 701064809H1
caacactggagcaataaaggtggatgagtattcctgcacaagcataccctgcatatgggctgtgggtgatgtcacaaaccgaatgaatcttactccggtggccttgatggaagcatcgtactttgctaaaactgtatttggtgggcaaaaaatcaagccagactacaataatattccctatgcagtgttcagcattccgccactttctgtagttggtctcagtgaggagcaggcaatagagcaaaccaatggcgatctgttggt

SEQ ID NO: 11724 - DNA, 262 bp, Glycine max
  Clone ID: 701064810H1
attcaaattcagaagatgttacgccgcgttcgccaatgagaatcgcgagtacgtgatcgttggcggcggaaatgccgcgggatatgctgcgcgcactttcgttgagcatggcatggctgatggtcgtctcgtattgtaaccaaagagccgtatgcaccttacgagcgtcccgctctgacgaaagcgtatttgttcccgccggataagaaaccagcacgccttcctggttttcacacttgtgttggcatcggtggagagaggc

SEQ ID NO: 11725 - DNA, 265 bp, Glycine max
  Clone ID: 701064811H1
caccgcacgaatatcttgttgtttggagcgatccgagaaaaactctgtaaacatgttggtttaccaggacctccttacaggtgatgagcttctctctgactccttccgttacaaggaaattgagaatggaatgctgtgggaagttgaggggcagtgggttgttaaaggagcagttgatgtagacattggtgcaaacccttctgctgagggtggaggagaagatgagggagttgatgatgcagctgttaaggttgttgacattgtt

SEQ ID NO: 11726 - DNA, 273 bp, Glycine max
  Clone ID: 701064813H1
cagactaggagctgcccaaaattgctctgccactcttaacggcaaccacaagctcaccgatgctgttcttcctccaacgaaagactggagaaaagcaggtatagtgagttcagttaaagatcaaggcagctgcggatcatgctggcacattcagcacaactggggctttagaagcagcctatgcacaagcatttgggaagagtatctctctttctgagcagcagctagtggactgtgctggcctttcaacaactttggctgccatggtgggtt

SEQ ID NO: 11727 - DNA, 275 bp, Glycine max
  Clone ID: 701064814H1
aatttccattgcatgcaaagcaaatacgcattatattactagttttaatttgttttgtcgtttgcttctttctttgattaatgatgactagctttaaggttgcatgtgtggttgcgatgatgtgcatggttgtggcatgagtgttacacccatggcacaggccgcaatcacgtgcgggcaggtcgccggcgacgtgtctccgtgcctcagttatcttcgaagcggcggaaaaccgtcggacgcctgctgcaacggagtgaagtcgctcagcggcg

SEQ ID NO: 11728 - DNA, 275 bp, Glycine max
  Clone ID: 701064815H1
tgttctttccattgatttcttgcttctatatattacttgcttcttttcttgatcatgtcccttgctggtaaaatcagctctgaaattggtgttcaggcaaccgctgcaaagtggttcaacctcttcacaacacaacttcatcacgttcaaaatcttactgatagaattcatggcaccgagctgcatcatggtgaagactggcatcacaatgagtcggtcaagcactggacttataccatagatggcacggttacaacttgcacggcgagtattga

SEQ ID NO: 11729 - DNA, 276 bp, Glycine max
  Clone ID: 701064816H1
ctttcaataatttaaagggtcgggtaccctcgccgttggcttcggctaagtttatcgggcatttggatcttagccataaccatttgtgtgtgatcattcctctcggagcacccttcgatcacctcgaagcgtcgtcgttactagcaatggttgcttgtgtgggaaccccttgaagacttgctagttatagtgggtgaccgggatccgaatacgtacccggatagatacccgatttgtttacaaggtgtggtgtaataattttactctattttgttg

SEQ ID NO: 11730 - DNA, 274 bp, Glycine max
  Clone ID: 701064817H1
caaggaccaaaattagttttacaaatatttatccaaacacgataaataaattgagaaggagtaagggagtgtttggttacttctgagattcttctgttcctaagagagagagagagcgatgacggtagcagcggaatcggttacgctctggtagcactaggaccctctctctccctcttcgtttccgtcatttccaaaaaacccttcctcattctcacagttctctccagtacgttgttgtggcttattagtttgattgtgctgtctggaatat

SEQ ID NO: 11731 - DNA, 270 bp, Glycine max
  Clone ID: 701064818H1
ctctaactttcacacgcagcggcttcttcttccgttttcctcaatcggtgtgaacaatggcgacgtacgctgcgatgaaacccaccaagccagggttggaggagtcccaggaacagatccataagataaggatcaccctttcttccaagcacgtcaaaaacctcgagaaggtttgtgcggacttggttcgtggtgcaaaggacaagcgcctcagggttaagggacctgttaggatgcccactaaggttcttcacatcactaccaggaagt

SEQ ID NO: 11732 - DNA, 268 bp, Glycine max
  Clone ID: 701064819H1
gcacactctctgctcctagggtttctccttcgagtgagggaaatggctcccaaaccgcctagtacgggtctgtttgttggactgaacaagggtcacgtcgtcaccaagaaggaattgcccccacgcccctcagatcgtaaggggaaaacaagcaagagggtgcactttgtgaggaccctcataagagaggttgctggttttgcaccctatgaaaagcgtataactgagttgctgaaggttgggaaggataagagggcactgaaggttg

SEQ ID NO: 11733 - DNA, 266 bp, Glycine max
  Clone ID: 701064820H1
tggggttccattatcgggtctgagttcaatggagagatttcacgaagtttgcaggtactgtcgaggagatgctatgcgtcagcctcagatctccccccacaccaggaaattggaatgccttctctctcacctacaatgacagagggtaacattgcaagatggttgaagacagaaggtgatagaatctctcctggtgaagtgctctgtgaagttgaaactgataaagccactgttgacatggaatgtatggaggaaggttttctggc

SEQ ID NO: 11734 - DNA, 261 bp, Glycine max
  Clone ID: 701064821H1
caaactcaaagcctaaacacatttcattcccaaaaaactcactcacgagagtgcatcattcctcatttgatcctctcttcccccatgaccttccaaccagtccccactctccttctccttctcctcctcgcgtccgcaaattcccattttgccctcgccggaaagcgcaaggttcacatccccgacgagttggacgacgtgttcgacgacgaggaggacgacgcgtggcgagaatggggcaagaaacccgaaccccctttc

SEQ ID NO: 11735 - DNA, 254 bp, Glycine max
  Clone ID: 701064822H1
ctggttcagttctgtcgtgttgcaagttgcaactgaaccaatcatcaactttcttgtattccaaattatcttcaccattacaatcctcaaagtcaaaaagtgaagaccttaacataaaacaaaacacaatggtaatgtgggtatttgggtatggttctttgatctcgaaagctgggtttcactatgacgaacgtattgttggtttcatcaaaggctatcgacgagtcttctaccaaggctctactgaccacaga

SEQ ID NO: 11736 - DNA, 260 bp, Glycine max
  Clone ID: 701064823H1
gcatttatgatttaactgtttgttggcttgacttggttttcttcagttttgtagaaggtactaagatgtaggcatgctagatccttattgcttgactgttgactatccaagcattctgggaattggaaggaggattgatgtcataccttgaagaatttgagtcaagaagcaaggggtcaaccacaattgaggactttttttttgtaattttgtaattgacaatttgctttgctttcaaattttgtaacaaaaaggtcttt

SEQ ID NO: 11737 - DNA, 113 bp, Glycine max
  Clone ID: 701064824H1
cagacatgcagtgtgtatcacttgctcttcgattcggatcaatgtaatcaagtcatcgttgatatcaaataaataatggcatgccagagaatggaataaattatcttttcaac

SEQ ID NO: 11738 - DNA, 263 bp, Glycine max
  Clone ID: 701064825H1
tggagaagagaagctaaagaaagaaaggagatgggagtggagaagcagttgttgaggtctggcaccggtccgaagccaattcccggtcagaacgtaaccgttcactgcactggtttcgggaagaacggtgcctttctcagaaattctggagcacaaaggatcctggccagaacccattcactttcaaaatcggccaaggttctgttatcaaaggatgggatgaaggtgtgcttggcatgcacattggtgaagttgctcgtctc

SEQ ID NO: 11739 - DNA, 261 bp, Glycine max
  Clone ID: 701064826H1
ctgatctcaaaggatatgaaggcagataatacttgctgtgcaatatgtttgcaggatattgaagtaggcgaaattgcacgaagcttacctcgctgtcaccatacatttcacttgatatgtgtggacaaatggcttgtcaagaatgattcgtgtcctgtttgcagacagaatgtgcaacttgttccttgggcaatttgagattatcttaatgggcggatgcatatgtggaataattggttccttataatccaactgggatta

SEQ ID NO: 11740 - DNA, 268 bp, Glycine max
  Clone ID: 701064827H1
gtcgtcgctgtttgtgtgtgtatcaggtgcagctaccaacgatggtgaagggtcgtcaaggagagcgcgtcagactctacgtgaggggtacaatccttggatacaaaaggtccaagtccaaccagtacccaacacatccctgatccaaattgagggagtgaacaccaaagaagaagtaggatggtatgctggcaagaaaatggcctatatctacaaggctaaggtgaaaaaggatggaagccattaccgctgcatatggggcaaggtt

SEQ ID NO: 11741 - DNA, 273 bp, Glycine max
  Clone ID: 701064829H1
ggcgttctatatattactgaattgacaatgactcctgctcttgctttgctacctcttctattagccttcatgaagttagctgctactacagaatcaagctaagatacaggggcatatcggacaatgatcatgcacgatcaggaaatgccagcaggacttcaaggtcctgtgccatttcaatctgaaaataaccctaagactcaagagcagcttggtaaaggtgccaaaaaccattgtgaagagtctctagttaaaaatacacaagtcaatagt

SEQ ID NO: 11742 - DNA, 273 bp, Glycine max
  Clone ID: 701064830H1
tctacgaccgattcggctcgaggtgagtttgttgatcgagataaattgaaacagtgtgatgacaatgaaggtccttgttttcttcgttgctacaattttggtagcatggcaatgccatgcgtacgatatgttcctctccgaatgaacactggctatggtgcccgtactccggaggtgaaatgcgcaagttggaggcttgctgtggaagcacacaacatctttggctttgagaccattcctgaagagtgcgttgaagcaacaaaggaatacatc

SEQ ID NO: 11743 - DNA, 277 bp, Glycine max
  Clone ID: 701064831H1
aattgcaagaatggcacttcgttgcttggtgatgtccctttctgttctcttcactcttggtcttgcgagagaaagccatgccagagacgaagatttttggcatgctgtttggccaaacactcccattccaagttcatgcgagatcttctaaagcctggccctgcaagtgttgacatcgatgatcaccctatgcaaattgaagaaacacagtacccgaaaaccttcttctataaagacgaccttcatccaggcaaaacaatgacagtacaattcagca

SEQ ID NO: 11744 - DNA, 275 bp, Glycine max
  Clone ID: 701064833H1
cgtgcccccttgattcctggcatggaggctgtcaagagggctgccattcaggccggtgcttttggctgtaccatcagccgcgccggccctaccgccgtcgccgtcattgacgacgagcaaactggacacctcatgccaaacacatgattgacgcttttctccatgttggcaatttgaaggcttctgcaaatgtcaagcagcttgatcgccttggtgctagacgcattccaaattgaaccttctcttctctatctctatgagaggcttgtagattt

SEQ ID NO: 11745 - DNA, 264 bp, Glycine max
  Clone ID: 701064834H1
gcaagtgtgaacaccgaagttgacattccaggtgatgctgctgcgtgtcaagagaacaccaagaagaggggacatgctgattcaagctgccaggtgggatctaaagcttgccgtgagaagttgcggaggcagagactcaatgaaaggttctgtgacttgagctctgttttggagccagggagacctgtgagaacagataaaccagctatacttgatgatgctatcagagtcttgagtcaacttaaaactgaagctcaggagctc

SEQ ID NO: 11746 - DNA, 251 bp, Glycine max
  Clone ID: 701064835H1
gtttctatggcttctgcagaagtagagttccgatgctttgttggtgggcttgcttgggccaccgaccacgatgctctcgagaaagccttctctcaatttggcgaaatcgtcgaatgcgaagcgtcatcaacgatcgtgccactggaagatccaaagggtatggatttgtgaccttcgctacagatcaagcgatctcagacgcacttgatagcatacacggccagaacctcgacggtcgtaatataaccgtg

SEQ ID NO: 11747 - DNA, 258 bp, Glycine max
  Clone ID: 701064836H1
gtcgcttcgcgatgcccatgcttgaggttatcatttttggggcttgggtatagatgactgctctgagattttaggttttgcccttaattgtattttggggatgggtagacctaagatcaaaccttttgtaattattcgaaccattttcattattattttgggttgtatttgttgctctctagtttgtttgagacgtatgtatttggttaactcttctggcatatgatacctacttattatatttgatgaccatggaga

SEQ ID NO: 11748 - DNA, 264 bp, Glycine max
  Clone ID: 701064839H1
aacacaggcgcagagcgtgatccattgacgaagatggtgcagcgtctcacctaccgcaagacgcacagctatgccaccaaatccaaccaacacagggtcgtcaaaacccctggtgggaagctcgtttatcagaccaccaagaagagggccagccggcccaagtgccccgtcactggccagaggattcaggggattccacacttgaggcctgcagagtacaagagatcaaggttacccagaaaccgtaggactgtcaaccgtgca

SEQ ID NO: 11749 - DNA, 262 bp, Glycine max
  Clone ID: 701064840H1
gttctgttctttttcccacccaattcagttttctcaaatggctcgtacgaagcaaacggctcgcaagtccaccggcggcaaggcgccacgtaagcagctggccaccaaggcggctcgtaagtctgctcggctaccggcggcgtgaagaagccgcacagattccgtccgggaaccgtagcgctccgcgagatccggaagtaccagaagaggccggaacttctgatccggaagctcccgttccagcgattggtccgtgagatcg

SEQ ID NO: 11750 - DNA, 261 bp, Glycine max
  Clone ID: 701064841H1
cggctcgagatcgcgcatagtgtggtaccagcagcagagcttgtatacgtcgccgcttcagcgtagcaacatgatcattcccgagaagaaccgtaaagagatctgcaaatacctcttccaagagggagttgctttgcgaagaaggacttcaatctggcgaacacccggagattgatgtgccgaatctgcaggtgataaagctgatgcagagcttcaaatccagagagtacgtgagggaaacatttgcgtggatgcactatt

SEQ ID NO: 11751 - DNA, 266 bp, Glycine max
  Clone ID: 701064843H1
attttcttttccttcactttcccgagaaaaaaataacacttttcactttcttcactacgttctcacttcgatatggctcgtacgaagcaaaccgctcgcaagtccaccggtggcaaggcgccacgtaagcagctcgccaccaaggccgctcggaagtccgctccggcgaccggaggagtgaagaagccccaccgcttcaggccgggaaccgtggcgctgagggaaatcagacagtaccagaagagcaccgagcttctcatcaggaa

SEQ ID NO: 11752 - DNA, 277 bp, Glycine max
  unsure at all n locations
  Clone ID: 701064848H1
gcaagatgtcgaagagaggacgcggtggttcggcggggaacaagttccggatgtcgctgggtctgccggtggcggcgacggtgaactgcgccgacaatacgggggcgaagacactctacatcatatcggtgacaggatcaaagggcgtttgaaacgtctcncctcggcttgcgttggcgacatggtgatggccaccgtgaagaaggggaaacccgatctgaggcagaaggttttgccagctgtcattgttcgccagcgcaagccatggcgccgaaag

SEQ ID NO: 11753 - DNA, 272 bp, Glycine max
  Clone ID: 701064849H1
gtgatcggtgttcacttgatccttcataagtcgtcatcatcatcatcatcatcaccgttgattgaagaagatgccgatcagaaacatcgccatcggcacgcctgaagaggctactcaccccgacacgttgaaggcggggttggctgagttcatctccaccttgatcttcgtgttcgccggttcaggttccggcatcgcctacaacaagctcaccgacaacggcgccgccactcacgccggcctcatctccgcttccatcgcccatgctttcg

SEQ ID NO: 11754 - DNA, 267 bp, Glycine max
  Clone ID: 701064850H1
gcgttctgcttcggttcacaaggcaccagctgctccgttctgcttcggcttcagagtttgtgtaacattctccttccttcttccgatttcgaagatggctgaagcagaggatgccgtaagacgccgtaatgcggtcgccgagtatcggaagaaacttctccagcacaaggaattgctctccagagtccgatccgtcagggagaatttgcgcgcttcaaagaaagagttcaataaaacagaagatgatttgaaatctcttcaaagtgt

SEQ ID NO: 11755 - DNA, 261 bp, Glycine max
  Clone ID: 701064852H1
ggagtataggcagcaaccttccattgttcgcttgacaaggtcgacccgccctgacaaggctcgtcgcttgggcttcaaggctaagcagggctatgtgatataccgtgttcgtgttaggaggggtgccgaaagaggccagttcccaaaggtattgtttatgggacgcccacaaaccagggtgttacccaactgaaatttcagcgtagcaagaggtcagttgctgaggagcgagctggacggaagctgggtggacttagggtc

SEQ ID NO: 11756 - DNA, 109 bp, Glycine max
  Clone ID: 701064854H1
cgcttactattagcttttacgatcatcacgtagctacgacatagcacgttaatgccaaaccaaaaccccaacaccaaaaacaaaaaaaaaaacacaaaaaccggggggg

SEQ ID NO: 11757 - DNA, 247 bp, Glycine max
  Clone ID: 701064855H1
tccttctacactaactaaagcctagcagcgagagagagaaaccctagcaaaaatgccggctggtcacggtttgagatcccgcaccagagattccttctctcgtcccttcaggaagaagggtaccatcgccctcaccacatacctcataactaccagtcggcgatatgtcgacgtcaggttaacggcgccgtccaaagggaatgcctcacaattctaccatggctgcacggtcgcgtctggactgtca

SEQ ID NO: 11758 - DNA, 255 bp, Glycine max
  Clone ID: 701064856H1
tagaaacagtgtgatgaaaatgaaggtccttgttttcttcgttgctacaattttggtagcatggcaatgccatgcgtacgatatgttccctctccgaatgaacactggctatggtgcccgtactccggaggtgaaatgcgcaagttggaggcttgctgtggcagcacacaacatctttggctttgagaccattcctgaagagtgcgttgaagcaacaaaggaatacatccatggcgaacaatatagatcagactc

SEQ ID NO: 11759 - DNA, 260 bp, Glycine max
  Clone ID: 701064857H1
cgcggtggcgccaagaagcgcaagaagaagacctacaccaagcccaagaagatcaaacacaagcacaagaaggtcaagctcggcattctccagttctacaaggtcgacgattctggaaaagtgcagagctccgcaaggagtgccccaacgccgagtgtggtgccgggactttcatggccaatcacttcgaccgccactattgcggcaagtgtggcttgacctatgtctaccagaaggccgatgcttaaattcgttggaag

SEQ ID NO: 11760 - DNA, 263 bp, Glycine max
  Clone ID: 701064858H1
attcctcttcccattctagggttccaaatggacgctggcggaaagatcaagaagggcgccggaggaagaaagggcggcggccctaagaagaagccggtttcaaggtccgtcaaggccggtctccaattccccgtcggaagaattggccgttatttgaagaaaggaaggtacgcccagcgtgtcggtaccggtgctcccgtttacttggccgcagttctcgagtacctagctgctgaggtgcttgagttggctgggaatgctgc

SEQ ID NO: 11761 - DNA, 267 bp, Glycine max
  Clone ID: 701064860H1
gtgacatgttgtcttcgattccctggtcaactcaactcagatcttcgcaaactcgccgtgaatctcattcccttccctcgtctgcacttcttcatggtgggatttgccccactcacttcccgcggttcccacagtacagggctctcactgtccctgaattgacccaacacatgtgggatgctaagaacatgatgtgtgcagctgatcctcgccacggtcgttacttgacagcttctgcgatgttccgtggaaagatgagcacaaagg

SEQ ID NO: 11762 - DNA, 264 bp, Glycine max
  Clone ID: 701064861H1
cttagccgttgctctgcttcaacaatgcggaagcagaagaagcgccgcactatggtgaagtactccagagaacccgacaatcccaccaagtcctgcaaggccagaggcgctgactccagagttcattttaagaacactagggagactgcctttgccatcaggaagttgccccttgttaaagctaaacgatacttagaggatgttttggcccacaaacaggctattcctttccgacgcttttgtggtggtgttgggaggacggcc

SEQ ID NO: 11763 - DNA, 271 bp, Glycine max
  Clone ID: 701064862H1
gaggtcaattcgcaaattggagccaaaggatgtcattctcggccaatataaaacaagtggtggagccaaagttgatgcgtgcctaaatggtctgacacctacttattttgctgctgcactatacattgacaatcacgatgggatggcgtgccatttctgattaaaacaggcttggggctcatcaaacaccagtacaatcatcatcttttgtgtgaattttctttagatatgtactttttatgttctagattacatatttagattctttggc

SEQ ID NO: 11764 - DNA, 274 bp, Glycine max
  Clone ID: 701064864H1
actgcctctgttaaagtttgtatttttctgagtgggtgggttgattgagagtgctgtgcaagctttggaactttttcccaacctgctacttcaatggacactgaagaggttaacaaacctcaatcacttcgtcataccctgagatgatagtgaaagcacttgaagcactgaatgagccaaatggatcgaacaagtcagcaatatcacagtacatagaaaccatgctaggtgagttgccagacgcaaccgttttggggagtcaccttaacaagat

SEQ ID NO: 11765 - DNA, 272 bp, Glycine max
  Clone ID: 701064865H1
acagaactaaacactaactggatcaaaactaaagggtattcttccggcgattgtattgtatattgacgctcacagatttctgggagcgacagttgcaacttcgattcgacttgaagagagggaggaaggggaaattggcaaattataagaatacgctgaaatgtcagcgcttttcaatttccattcatttctaactgtgatacttctgggaatatgtgcctgcacttatttcaagatgcagtttccggcgatccttgaccagaaaactgggt

SEQ ID NO: 11766 - DNA, 264 bp, Glycine max
  Clone ID: 701064866H1
cttttctcagctgctgttcctgcgcgtgaacaagcctcaggtaagccaaagccatggttaagcataacaatgttatccccaacggacacttccgtaagcactggcagaactatgtgaagacctggttcaatcagccagcacggaagacaagaagacggttggctcgtcagacgaaagctgtgaagattttccccagacctacagctggacctcttagacccattgtacatggtcaaactttgacatacaacatgaaagtgagag

SEQ ID NO: 11767 - DNA, 130 bp, Glycine max
  Clone ID: 701064867H1
gttctaaagcactcatccacacattctccgtcgccacgacaacaatggctccaaagaaaggtgcgaaaggtggagttgtagcagcaaagaagaaggttcaggagaaggtaacgaaccctttgttcgagaa

SEQ ID NO: 11768 - DNA, 256 bp, Glycine max
  Clone ID: 701064869H1
gacaccaacaccaaaccttaaaattattttgcccctctgcttctctctctgtctttctcagaagacaactcaaaaacaccatggacgtgggtcagatgcagagacagtggatcgactacaccaactccctcttccttgagggcttcctggatggtcagtttctgcaacttcagcagcttcaagatgagaacaaccctgactttgcggtcgaagttgtctctctcttctttgaagcttctgaaaggcttctcaaaga

SEQ ID NO: 11769 - DNA, 258 bp, Glycine max
  Clone ID: 701064870H1
cgcctctaacctcgcagttccttgatctctcctctcaagatgcagatattcgtgaaaactttgaccggcaagaccatcacccttgaggtggaatcctccgacaccattgacaacgtaaaagctacgattcacttcaaggaagggatcccacctgaccagcagagacttatctttgcgggtaaacaacttgaggatggtcgcacccttgccgattacaacatccaaaaggaatccaccctccatctcgtgcttcgcctc

SEQ ID NO: 11770 - DNA, 258 bp, Glycine max
  Clone ID: 701064871H1
cagatatcttgctagggttttaggaaaagacactgtctcgcgagtgaacacaggttacagcaatggctttctttggtagaattgggaatttattaagacagacagcaagcaggcaggttagttcgaattgcgatcatccccttcgttttttcaggctatacgcagtatgtcatctgctccaagcacaaagctgtttatcggaggtgtttcatattctactgacgagcaaagtttgagggaagctttttcaaaatatgg

SEQ ID NO: 11771 - DNA, 258 bp, Glycine max
  Clone ID: 701064873H1
cacagccccgtgccgtcaactgtcaaccaccctccgtccaccgcacgcgcacctcgccaccaacatccagcaactcgcaccagaacagcacctcccatcgttgacgcacaaagtagcaggccgtcgactcgcgccctcccgtccacagtcgcagtcggaccagccaccagtgatgggaaagatgtgccagaatcagcaacaagctggtgggcatggacctccaagagagcaaactgatacacaggaacaagacatgga

SEQ ID NO: 11772 - DNA, 257 bp, Glycine max
  Clone ID: 701064874H1
cgaggagaagcagaaggagcaaaagcaatggcgccgaagaagccgagaatcacgacaaggaaccctgatttggttagggggattggcaagtattcgaggtcgcagatgtaccacaagacgggcatcgggccatcaaggccaaaaactgtggcgttttgccccgcacgatcccaagcccaagcccgaggcccggcccagaagcggccaagttctaccccgcggacgatgttaagaagcccctcgtcaacaagcacaag

SEQ ID NO: 11773 - DNA, 265 bp, Glycine max
  Clone ID: 701064875H1
attcattcaagattcagcacgtgcgttttggaagcagagaccgaaatacttcgagatggcccgtacaaagcaaactgctcgtaagtcaactggcggaaaagctcccaggaagcagcttgcaaccaaggctgcacgtaagtctgcaccaacaactggtggtgtgaagaagcctcatcgttatcgccctggaactgctgctcttcgtgagattaggaaataccagaagagcactgagctcctaatcaggaagcttcctttccagagg

SEQ ID NO: 11774 - DNA, 266 bp, Glycine max
  Clone ID: 701064876H1
ctcgtctttggttctggtttatagatctctgtgaagtcgctttataacactcaacctaagatgcagaacgaggaaggacagatcaccgagctttacattcctaggaagtgctctgccacaaaccgattgattaccgctaaggaccatgcttcggttcaggttaacattgggcatgtggatgagaatggcgtctacaatggccatttctccacttttgctctctgcggcttcatacgtgctcagggtgatgctgacagtgccctaga

SEQ ID NO: 11775 - DNA, 268 bp, Glycine max
  Clone ID: 701064878H1
aaacactcttcttcatattcttcttcttctccttgttcttgttctatctgtgacgagcatcatggcctcgagagcagtgctattgttggctatgtgtgtgcttccggccatggttgtggccattcgcccagaaagacacctttttgcgtgaagggtcgcgtctactgtgacccttgccgtgctggttttgagcactcagcaaccacctacattgccggtgctgagattatgttgcaatgcaagagcagggttagcaacgaggttgtgt

SEQ ID NO: 11776 - DNA, 266 bp, Glycine max
  Clone ID: 701064879H1
tgtttttgttcaaggctggatccttgctggatgttgacagtcacattctttattctccacttccctgccgtgttcccttgcctgggtttgaaagcttccggttttgcttttcacaatatgatgagaaagacgaaatctcctaagaaacttgtgctttcatcttggagctaaatatggggagaagttgactaagaaggttacccatttgttgtgtaaattcaccaatgggcccaagtatgaggctgcttgtaaatgggggattcatc

SEQ ID NO: 11777 - DNA, 278 bp, Glycine max
  Clone ID: 701064880H1
tcaacgcggtagagagaatctagggagaagatctcagcatgaaggcacacacataaataacactacatccatgccactgtgccaccacagttttttctctcatgcacctactaatagcaaaacaaaaagctaagagggataattacattccacctctccttcccattctcactctctctctctctttctatttctctctccgtgcgtgaccttgaattactgatattttatattttaaccagctatatatattacaagaacacatagatagtgtgtgt

SEQ ID NO: 11778 - DNA, 266 bp, Glycine max
  Clone ID: 701064881H1
attctctttgcgcagttccctacctctcctttcaagatgcagattttcgtcaagaccctcaccggaaagaccatcacccttgaggtggaaagctctgacaccatcgacaacgtcaaggccaagatccggacaaggcaggaattcccccggatcagcaacgtctcatcttcgccggaaagcagctcgaggacggccgtaccctcgccgaatacaacatccagaaggagtcaacccttcacctagtccttcgtctccgtggtggcatg

SEQ ID NO: 11779 - DNA, 113 bp, Glycine max
  Clone ID: 701064882H1
gagaattaggtttttagggtttacaccgagcagcgacacctccctcccgcagtagccatggttctcaaaactgaactatgccgattcagtggtgccaagatctaccccggccc

SEQ ID NO: 11780 - DNA, 262 bp, Glycine max
  Clone ID: 701064883H1
ctcgagctctgcgagatcttcattcgccgattttaaaagatgagtaagcttcagagtgatgctttgcgtgaagccatttcaggaatcatggccgattccaaggagaagaatcgcaaatttgtggagaccatcgaactccaaatcgggttgaaaaactacgatccacagaaggacaagcgtttcagtggctctgtcaagctgccccacatccctcgccccaagatgaaaatttgcatgcttggtgatgctcagcatgttgaag

SEQ ID NO: 11781 - DNA, 102 bp, Glycine max
  Clone ID: 701064886H1
gcttccccttagtcaaacaaagtaacacaccatccatcctctctctcttctcttcttctgttctctagtttcctgctcttgtttcttagaatccgtacggtc

SEQ ID NO: 11782 - DNA, 256 bp, Glycine max
  Clone ID: 701064887H1
cctcgagccgaatcggctcgaggatcgagataactagaaacagtgtgatgaaaatgaaggtccttgttttcttcgttgctacaattttggtagcatggcaatgccatgcgtacgatatgttcctctccgaatgaacactggctatggtgcccgtactccggaggtgaaatgcgcaagttggaggcttgctgtggcagcacacaacatctttggctttgagaccattcctgaagagtgcgttgaagcaacaaaggca

SEQ ID NO: 11783 - DNA, 259 bp, Glycine max
  Clone ID: 701064888H1
cttcaaacctaacgcagcatcgctattctcttcattccatggctttgcccaaccagcaaaccgtggattaccctagtttcaaactcgttatcgtcggcgatggtggcacaggaaagacaacctttgtgaaaaggcatctcaccggagaattcgagaagaaatatgagccaaccatcggtgtggaggttcacccattggattttttcacaaactgtggaaagattcgattttactgctgggatactgctggacaggagaa

SEQ ID NO: 11784 - DNA, 256 bp, Glycine max
  unsure at all n locations
  Clone ID: 701064889H1
ctccaccttgctttcttctccagcgtccgattctctcaccgatctcgcgccaaatacaaattcgtgtcaacccaacccagggttccggcgagcatggccgacggtccggctagcccaggcggcggcagcacgagagcggcgaccacagccctcgctctaacgtgcgcgagcaggacaggtacctccctatcgctaacataagccgcatcatgaagaaggcacttcctgccaacggtanaatcgcaaaggacgccaa

SEQ ID NO: 11785 - DNA, 260 bp, Glycine max
  Clone ID: 701064890H1
taaagtttgcccccttacacgttttttgtcttcttttttctcccatctttgtttcgagaagcatttgacgaagagaagagacagtgaatcgcggtttcaattcaacccacttcatctcaggtgtttgaagttgagataaaaatgagcggaacagagaaagcaggatcaggaaccaccaaaacccccgccgatttcctcaaatccattcgtgggaggccggttgtcgtcaagctcaattctggtgttgattacagaggtat

SEQ ID NO: 11786 - DNA, 265 bp, Glycine max
  Clone ID: 701064892H1
cattgatttcttgcttctatatattacttgcttcttttcttgatcatgtcccttgctggtaaaatcagctctgaaattggtgttcaggcaaccgctgcaaagtggttcaacctcttcacaacacaacttcatcacgttcaaaatcttactgatagaattcatggcaccgagctgcatcatggtgaagactggcatcacaatgagtcggtcaagcactggacttataccatagatggcaaggttacaacttgcaaggagagtattg

SEQ ID NO: 11787 - DNA, 270 bp, Glycine max
  Clone ID: 701064894H1
cttttctcagctgctgttcctgcgcgtgaacaagcctcaggtaagccaaagccatggttaagcataacaatgttatccccaacggacacttccgtaagcactggcagaactatgtgaagacctggttcaatcagccagcacggaagacaagaagacggttggctcgtcagaagaaagctgtgaagattttccccagacctacagctggacctcttagacccattgtacatggtcaaactttgaaatacaacatgaaagtgagagctggaa

SEQ ID NO: 11788 - DNA, 255 bp, Glycine max
  Clone ID: 701064896H1
attactttctttccattttccttcgttttctctctctttctcagtttctcagtttctcagtcatcaccatcgcagcagcaagatgtggaaccaaccattcggaaaaaccgatttggaaagcggttctcggcctctgtatccgatgatgctcgagagccctgaactgcggtggtcgttcatcagaaaagtgtactccataatcgccatccagttgctcgtaaccatcgtcgtcggcgccgtcgtcgtcaacgtccg

SEQ ID NO: 11789 - DNA, 285 bp, Glycine max
  Clone ID: 701064901H1
catccttcgctgcccagccgtcaccaaccggtcggcagcgacgcagaggagatcagtggtagtgaatgcagccagcaaatctgttgaaggggaaaaggtcagttatgacaacaatggtagcaatgcaaggaggaacttgatgttcgccacggcggcggctgctgtttgctcttttgctgcagggatggcattggcagatgagcctaaaccaggaacctcagaagccaagaaaaagtatgccccggtttgtgtcaccaatcctacagctaggatttgtcgcaattg

SEQ ID NO: 11790 - DNA, 281 bp, Glycine max
  Clone ID: 701064903H1
ggaagagagaggaaggaagagcacagcactacacagctccgaaataggagggggagaaattttgtatgcgttggatttcgtagatctgaataaatgacaaatgtatcattcaaagaatgttcctagtgcaagtttaattggtggtaattcattaagtcatggtcagcacatagattgtggtggcagcacaatggatcctggcagtggaggaaatggtcttagcaacaactctaatctcacctcaaaacaacgtttacggtggacacatgaattgcatgagc

SEQ ID NO: 11791 - DNA, 284 bp, Glycine max
  Clone ID: 701064904H1
cattgtttgtggcctttacttttctctgcagttcacaacgggtcatgcagatccaaatgctggaagaactttgaatcaggagggtggtgatcatcaaatacattgctctagagaaagaagtagaacagcttggaaaatcattcaagagtatttgatgccctttgtggagaaagaaaacataccacatctcaaaaaggtgtaggcttcaccctgacaatgacatatacagagatcaggagcaacataagtttcatacagatataaacgaatggcagtgtgggttc

SEQ ID NO: 11792 - DNA, 278 bp, Glycine max
  Clone ID: 701064905H1
ctagaattgttaatttctctgatcccattgtgaatttgtggggatctgaattgcggaggaagatgattcagcttctgttcacggtgatattttcggaggcttcgatgatagcgttgctgcacgttcaagacccctttgaggaagctcgtgataatgggcttggatcggttgaagcgaggtcgtggacccttgatggtgaagaccgttgcagggaccgttctcgtggtgttgttgtcgagtgtgtatagcatgttgaagattcagaagcgtgggatcca

SEQ ID NO: 11793 - DNA, 276 bp, Glycine max
  Clone ID: 701064906H1
gagagggagattctttgtttgctaccttctctcggaaaaatggttacgttcaggtttcaccagtaccaggtggttgggagggctcttcccacggaagcagatcagcaccccaagatctaccgaatgaagctctgggccaccaacgaggttcgcgccaagtccaagttctggtattttctgaggaaactgaaaaaggtgaagaagagcaatggccaagtgcttgccatcaacgagatttttgagaagaacccaaccaaaattaagaactatggtata

SEQ ID NO: 11794 - DNA, 277 bp, Glycine max
  Clone ID: 701064907H1
cagtctttcttggaactttgttactctcacacatgtctcgctccgtgcctttggtttcaaccatttttctcttgcttctgcttctggtggccactgagatgatggggccaacaatggtggcagaagcaagaacttgtgagtctcagagccaccgtttcaaggggccatgtttgagtgacaccaactgtggctctgtttgccgaaccgaacgtttcactggaggacactgccgtggcttccgtcgcagatgcttctgcaccaaacattgttaatttta

SEQ ID NO: 11795 - DNA, 277 bp, Glycine max
  Clone ID: 701064908H1
cctcgagcgaatcggctcgagtaacaatagcagaaactagaactatactaagatgcagccattgcaagaacttgcagtgtccttggctgttgattatttgcttccacccttcaagaaagcagtgaattcagtcatagaggttccaaaagattctgcagacatgaaagacaaacttgatgggattcaagccatgattcatgatgtggacaagatggcagcagctgaagaaagcaactcacgtgatggtctcaaagcaaaggtgaagcagctggtggaa

SEQ ID NO: 11796 - DNA, 113 bp, Glycine max
  Clone ID: 701064909H1
cagcgttgcagctctactagctatggcttcgcaagtccgatcgaagaagaacgatggcgatggctgctgctctgcgtcgcgaaggaaggcgtttgacccaaccaatcaacgcc

SEQ ID NO: 11797 - DNA, 267 bp, Glycine max
  Clone ID: 701064910H1
ctccactcttagctgccattggtttttcttcttccatttctcttcctttctaagcttttttcgattacccatttggagattctgtcctaatggctcttgctccttccaaagtttcctccttttccgggttttctcccaaacccagtgttggggatgctctgaaaaacccaacttgctctgtttctctgagctttgcgaatgtgaaactcggaagcagaaaccttagggtttgtgcctcaactgtgcctctctcaggggtgattttcg

SEQ ID NO: 11798 - DNA, 266 bp, Glycine max
  Clone ID: 701064911H1
ctcgagcgcatatctttcaccttctaaccatacttttgtctttctcgatttccaaggaacttttggatacttagctgccaccctcatatgatatctcttgaaaccttgtgttaaaaattgtgtccttttgaacttcaataaaaatttgattttcttttcttagtttcatacccacatacccattgttggatttgaactagttttacttgcctcatggcccttcatataagcagcggttgttttactgtgatgtgtaactcaagagt

SEQ ID NO: 11799 - DNA, 273 bp, Glycine max
  Clone ID: 701064912H1
cgtttatcgtgaggagaatatgaagttgtttgtcttctctgttgctgcagtagtcttcgtagcatggccatgccatggcgcaggctaccaaaggttccctctccgaatgaaaactggctatggtgagcgttcttcggaggtaaaatgcgcaagtcttaggcttgctgtggaagcacacaacatccgagcctttcaaaccattcctgaagagtgcgttgaaccaacaaaggactacattaatggcgaacaatttagatcagactctaaaacagt

SEQ ID NO: 11800 - DNA, 275 bp, Glycine max
  Clone ID: 701064914H1
ctcttagtatactcaactcagccaagtgcaccaccatttgctgcaggaggggaaagtgaaccagctgcaattcctgtaggaattccatctaccccacttacatttgacggaaatgagcaatcatctccacagcagatcccctatttccaaactcggggttcttctttaacttctggctctactgtcgcaacaacaaatcttcaaggagttcactctaatgatagaaggtttgcctctcattcttttcctgcaagccaagacagagcacagccatc

SEQ ID NO: 11801 - DNA, 273 bp, Glycine max
  Clone ID: 701064915H1
gcaaaaagcctttcatagtgagatagccctagaaatgtttcgtgaatctttgtttgctctctttctactttctgccttctcctcctcactcctacctttaaccactgctcaagattacgttctcgacacggacggtcacgcggttgaaaatcacggtacatactatttgttgccagcgaaatcaggaagcggcggtggtggaatagaggtagccgcaactggcaaagaaagttgcgctctcactgtagtgcaatctctgaacgaggactccat

SEQ ID NO: 11802 - DNA, 279 bp, Glycine max
  Clone ID: 701064916H1
cgcgaaaccccaaataccaatccaatcctctcccaactcacaaagccatgtctccaggtcccgttgtcgacgcttcccctgacgttgatgcagagcaacaacttccctccgtcgatgacgccactcagaagaagataccccaaccacaggaggacgatgctccccttgtcgaggacttgaaggatgatgacaaagacgacgacgatgaagacgacgacgacgacgacgaagatgacaaggaagacgatgctcaaggtggtgctgagggttcaaagcaga

SEQ ID NO: 11803 - DNA, 278 bp, Glycine max
  Clone ID: 701064917H1
cgctgaactttttcctcgccttaattcattgttaacctccatggaaggtttatctatatatgaacggaccacaaactccaatgaatcctctaaccgtgactcaaaaggtggagaacacgaagttgtgttcagactactttgctctaataatgtagctgggagcgtgattggcaaaagaggggctatagtcagagctctggaaagtaaaacaggtgcttctattatctttgcagctcctttaagcgagcatgccgagcgcattgtcaccatttctgcta

SEQ ID NO: 11804 - DNA, 280 bp, Glycine max
  Clone ID: 701064918H1
cgccgtcgtcgctgtttttgtgtgtcgctccttcgtaggtgcagctgcaatggtgaagggacgccaaggagaacgtgtcagactctacgtgaggggtacaatccttggatacaaaaggtccaagtcaaaccagtatccaaatacatccctgatccaaattgagggtgtgaatgccaaagaagaagtagcatggtatgctggcaagaaaatggcctatatctacaaggctaaggtgaagaagaatggaagccattaccgctgcatatggcgcaaggttaca

SEQ ID NO: 11805 - DNA, 123 bp, Glycine max
  Clone ID: 701064919H1
tcacgaatgacaagaatagaattcgtccaaggctccgggaatggaagagagaattttgaatatcgaatcgaatcgcagcaaataagcttcaccgtaacttcgtggaatcaaagtgattaagtt

SEQ ID NO: 11806 - DNA, 280 bp, Glycine max
  Clone ID: 701064920H1
ccaaagtattttgggttccttgtcaagagcacatcagctgcagttgtctgccgtttgagttttcaggcatcttatgtagacacgtgctacgtgtcatgtcaactaacaactgttttcacatcccggatcaatatttaccagcccgttggcgaggcaacaattcatcttctgttaaccactaccggggtacaaccagtagggatcagcctgaaaggatacactttttagaatccatggtttcaacgtttttagtggaatccattgaaactgaggaacgcct

SEQ ID NO: 11807 - DNA, 273 bp, Glycine max
  Clone ID: 701064923H1
gaaatggaggaagcaaagggagttgtgaagcacgttttccttgcaaagttcaaggacgacgtctctccagagcggattgaggagctcatcaaggactatgccaatcttgtcaatctcatcccacccatgaagtcattccattggggcaaggatgtaagtgctgaaaacatgcatcaaggcttcactcatgtgtttgaatcaacctttgagagtacagaaggcattgcagagtatacagctcatcctgcccatgttgaatatgcaactttgttc

SEQ ID NO: 11808 - DNA, 274 bp, Glycine max
  Clone ID: 701064924H1
ccagatgaagatgatccacgttcttttcctctttgctcttgtctcgttcacttcccatgcttctgtcaatgatttctgtgtagcagacctaaaacgtccagatagcccttcaggctatcagtgcaagccacctaacacagtcacagtggatgactttgtgttctctggctttgtagctggaaacaccacaaacactttcaatgctgcattaacctccgcatttgttactgattttccaggtgtgaatggtcttggtgtatctgcggcacggtta

SEQ ID NO: 11809 - DNA, 117 bp, Glycine max
  Clone ID: 701064926H1
cggaagcaatggcgagcaggtactgggcagtgtctcttcccgtccccaactccgcatctcagctctggaaccaattccaggaacgaatctccaagcattccttcgacactcctctct

SEQ ID NO: 11810 - DNA, 268 bp, Glycine max
  Clone ID: 701064927H1
gttttgtagtaagtgaggtgaggtgccaaaatggtgaagataactcttggtactttcgatgactcttttggtgttgcctctcttaaggcttatttggcagagttccatgcaactctgatttccgtgttcgctggtgttggttcagccatcgcttacaacgagcttacaaaagatgcagccttggatccaacggggctggtggcagtagctgtggcccatgcatttgcactgtttgtaggtgtctccgtcgcagccaacatctcgggtg

SEQ ID NO: 11811 - DNA, 270 bp, Glycine max
  Clone ID: 701064928H1
caacacttcacaatctctgtttcagctttctctcttttctacaatggcttgcaccaccgtcgtgttgacgctagtcgccgcattgttggtaacctccgtcgtggctcagtctccggcgtcctcaccagctctgtctccaaagcgcacccccgtcgccacacctcagaagtctccctcgccggcgatttctccctccgccgtgtcgccgtcgtcctctcctcccgctccggtggtgaacactccgtctccgtcaccaaactcagtcgactc

SEQ ID NO: 11812 - DNA, 272 bp, Glycine max
  Clone ID: 701064929H1
gggagtcagagaaatcctaggtaagaagaaaagatgccggctggtcatggtttgagatcccgcaccagagattccttctctcgtcctttcaggaagaagggaaccatcgccctcaccacatacctgagaacctaccacgtcggcgactatgttgacgtcaaggttaacggtgccgttcacaagggaatgccccacaaattctaccatggccgcaccggacgcgtctggaatgtcaccaaacgtgctgttggcgtcgaagtcaacaagcaggt

SEQ ID NO: 11813 - DNA, 273 bp, Glycine max
  Clone ID: 701064931H1
caccgcacgaatatcttgttgtttggagcgatccgagacaaactctgtaaacatgtcggtttaccaggacctccttacaggtgatgagcttctctctgactccttccgttacaaggaaattgagaatggaatgctgtgggaagttgaggggaagtgggttgtacaaaggagcagttgatgtagacattggtgcaaacccttctgctgagggtggaggagaagatgagggagttgatgatgcagctgttaaggttgttgacattgttgacacat

SEQ ID NO: 11814 - DNA, 276 bp, Glycine max
  Clone ID: 701064932H1
ctctctctgagattgtggtgagtagcataatggaggcaccgaagctgaaggtagtgacactgaaagccatcgaagcaactccgtcaaccttcaaagagttcggtcaggtcgtggaggcttcgcgagacggccaggaattcggtccccacgatgctcaactcgacctttcccaaggaactccaaggttctacattatcaagcttgaaaaatgcccgcttaagttttctagtattacacatcatgcaatcgtgactcagtgcctcgggtctatcggtg

SEQ ID NO: 11815 - DNA, 278 bp, Glycine max
  Clone ID: 701064933H1
cttaagcttgctactgagtttccacactgcataccttacgtcacccgaattcgaagttaatttgcaagatggctaaggaaaaggctcagatcaacattgtcgtggttggtcatgtggaccctgaggaggcaaccaccattaacgagctgaagaagcctgttgtggagaaagaagctccagggcatgccatatgagggcatgcacgtacggcctcggaggggaaccagaaaattatgttaacaaaataatctggaaccctaatgtatcagtgtcatcat

SEQ ID NO: 11816 - DNA, 276 bp, Glycine max
  Clone ID: 701064934H1
attcaatgctaaattattacagcaattagacaacttaaagacaaagctgggcttaaagactgctttggttgatgtttatggtatgatccaacgcgcggtcaccaaccctaaaaaatacggttttgtcgatggttcaaaaggatgtgttgggacggggacagtacgaatatggagattcatgcaaagggatggatacttgttcagatccagacaaatatgtattctgggatgctgttcatccaacgcaaaagatgtacaagataatagctgatgagg

SEQ ID NO: 11817 - DNA, 275 bp, Glycine max
  Clone ID: 701064937H1
ctcagccgcctcggctagggttcggaaacgaagaagggttctgctttcttttcgcgatgagggccaagtggaagaagaagcgtatgagcaggctgaagaggaagcgccgaaagatgagacagagatccaagtagtgcgttaaacctagtttgtttccgttgcttttacaattgcttatgttgtcaaataggacacccagttgttagtggcactggtctctcctttttgatgttttgatacattttgttggattttatttcgtcttatgttcttag

SEQ ID NO: 11818 - DNA, 286 bp, Glycine max
  Clone ID: 701064938H1
aatacggctcgagcgagttctatatattattgaattgacaatgaggcctgctcttgctttgcttccacttctagttgccttctcgttagcttccactacggtatcaagaatagatcttagggaatattggaatatgatcatgaaagatcaggaaatgtcagacggatttcaaggtcttgtatcatttcaatctgataataaccctaagtctcaagagtagcttggtaaaggttctaaaaaccattgtgaagagtctctagttacaaatacacaagtcaacagtgac

SEQ ID NO: 11819 - DNA, 268 bp, Glycine max
  Clone ID: 701064940H1
cggcgactgacacagtaattaaaggagctggaaagctgaagctggtgtttgttccagaaggccagggtgaggagactgaattcgaggtttttaacttcactggtgaagggggtgtttcattggctatgtacaatactgatgagtctattcgttcttttgctgaggcctctatggcaactgctttagagaaaaagtggccactttatcttagcaccaaaaatacaattctgaagaaatatgatggaagattcaaggacatatttcaaga

SEQ ID NO: 11820 - DNA, 270 bp, Glycine max
  Clone ID: 701064941H1
cgtttctctgcagcaacaaggtttagccactccaaacagacgagaaatgggtcgtggggtcagtgctggtggtggtcagagttccttaggttatctctttggcagtggggtgcctgccagcagtgcaaacagtcagcctgcaaatggtgctcgcactcaaaatgctagtgctcctttcccaccagtcgataagcaaagtccagcaccagcaccagcaccagcaccagcacctgcatcatcaccaattgataagcaaattccagctggaat

SEQ ID NO: 11821 - DNA, 265 bp, Glycine max
  Clone ID: 701064942H1
cagataactagaaacagtgtgatgaaaatgaaggtccttgttttcttcgttgctacaattttcgtagcatggcaatgccatgcgtacgatatgttccctctccgaatgaacactggctatggtgcccgtactccggaggtgaaatgcgcaagttggaggcttgctgtggaaccacacaacatctttggctttgagaccattcctgaagagtgcgttgaagcaacaaaggaatacatccatggcgaacaatatagatcagactcca

SEQ ID NO: 11822 - DNA, 281 bp, Glycine max
  unsure at all n locations
  Clone ID: 701064944H1
cggctcgaggataagcagaagcacttttttcatcatggaagcctattctggttcttattcctcatcatccaactctgcacacttgacccaaaacaaccgtgaggactcaaaagggtatcatatgaaccaagaaatttaccctcttcaaaatcacagttcttcgtggctccgntccgtgagacagacaccagcaaagccgtggaagaagcaccatgtggcaccgatgccaccaacaccagtgaaagtgtacaaagtggatgctataaactttcgtgaagttg

SEQ ID NO: 11823 - DNA, 267 bp, Glycine max
  Clone ID: 701064945H1
catcgagataactagaaacagtgtgatgaaaatgaaggtccttgtcttcttcgttgctacaattttcgtagcatggcaatgccatgcgtacgacatgttccctctccgaatgaacactggctatggtgcccgtactccggaggtgaaatgcgcaagtcggaggcttgctgtggaagcacacaacatctttgtctttgagaccattcccgaagagtgcgttgaagcaacacaggaatacatccatggcgaacaatatagatcagactc

SEQ ID NO: 11824 - DNA, 268 bp, Glycine max
  Clone ID: 701064946H1
ccacaacactgtgccctctttctctctttccttcgcagaagccatggcctcatttgcacgtggagccgcatctttaacccgcattggtctttccacttccaagactccccttcaactcatccaccgccgtggcctcgccgatcaccatggccctcccaaagttgcctgctggaaagatccaatgagcccatctaaatggaaggaggagcactttgtgattgtctctttaactggttggggactactcatctatgggggatacaagttg

SEQ ID NO: 11825 - DNA, 269 bp, Glycine max
  Clone ID: 701064947H1
cctcgaccgaatcggctcgaggctgcatactacgagcaaggtgcccgtttcgccaaatgacctactgttgtgagcatcaccaacggtccctctgctctggcagttaaggaagcagcctggggtctggctcgctatgctgcaattgctcaggacaatgggttggtcccaattgtggagccagagatcttgcttgatggggagcatggtattgatagaacttttgaagtagcccaaaaggtctgggcagaggttttcttctaccttgctga

SEQ ID NO: 11826 - DNA, 269 bp, Glycine max
  Clone ID: 701064948H1
acaaaggttcaaatgcaaggcgtctcagtgggtcgtgctgtcgatttgaccatgttggatggatatgatcaacttataaatgaattggaggagatgtttgacataaagggacaacttcaacaccggaataagtgggaaattgtcttcactgacgatgaaggtgacatgatgcttgttggagatgatccatggcctgaattctgtaatatggtgagaagaatcttcatttgttccagccaggatgtgaagaagatgagttgtggaagcaa

SEQ ID NO: 11827 - DNA, 274 bp, Glycine max
  Clone ID: 701064949H1
cgtgatttctattagcagcacaagtttgtcttctggtacactcgtcgaacacctggagttcgaaatcaaacatcatatgaggacaacataaagaaaattgttgaatttagtacggttgaaggattttgggtctgctactgccatcttgctcgtcctgcttctttacctagtccaacagatttgcaccttttcaaggaaggaatccgtcctctatgggaggtagatacttaaaagtagtagctgaagttgcattttcttgccgattgagaattta

SEQ ID NO: 11828 - DNA, 275 bp, Glycine max
  unsure at all n locations
  Clone ID: 701064950H1
ccctcttctctttctctgcaataatctctcttctcttcttcactctctcaactcctgccaaacccccatttccgcagttcttaaatttggagtctgatgtctccgccattgctggttaccgaagatgaagggcagtaccatgcctcgatggtagtacttaaatnctcaccatccctgatctgtttctccctaaatgaggccggatttaaagaatgcaattacctgggattgtcagattgctcttcggtggacagttctactgtcccgaatttgtc

SEQ ID NO: 11829 - DNA, 274 bp, Glycine max
  Clone ID: 701064951H1
ccgagtagcaacaatgtcgaagcgaggtcgcggaggatcggcgggaaacaagttccgcatgtcgctgggtctgccggtggcggcgacggtgaactgcgccgacaacaccggcgcgaagaacctctacatcatatcagtgaaggggatcaagggtaggctgaaccggttgccgtcaccttgcgtcggagacatggttatcgccaccgtcaagaagggaaagcccgatctccgtacgaaggtgctgcccgccgtcatcgtccgccagcgcaagcct

SEQ ID NO: 11830 - DNA, 273 bp, Glycine max
  Clone ID: 701064952H1
ccagaagacggagatgtatcagatctgtagcaggagaatatgcgtcggagcgttcgcgtttgtcctgcatttcctatcggcctcagcagacgacgtcgttgtgctctctgaagacaacttcgagaaggaagttggtcaggacagaggagctctcgttgagttctatgctccttggtgtggacactgcaaaaagcttgctccagaatatgaaaagcttggtagcagcttcaagaaagccaaatctgttttaatcggcaaggttgactgtgatga

SEQ ID NO: 11831 - DNA, 272 bp, Glycine max
  Clone ID: 701064954H1
cgctaaccaaccctgacactccttcttctccgcttcctcttcgatcatcgcttcagaatgccgccgaagttcgacccctcccagatcgtcgacgtcttcgtacgcgtcaccggcggtgaggtcggcgcggcgagttccctccccccgaagatcggtcccctcggtctctcccccaagaagatcggagaagatatcgccaaggaaaccgccaaggactggaagggcctccgcgtcaccgtcaagctcaccgtgcagaaccgtcaggccaaggt

SEQ ID NO: 11832 - DNA, 261 bp, Glycine max
  Clone ID: 701064955H1
ctcctccctttgagcttggtagttttggcttcacttggattaaattattcgctactatcatttttgtatgatctgttatcatggcgttagaaactatctttcaattgctaaacttgtctttcaaaaaggaaaacaaaaggatgagaagcctttgcgcataatcttcagagtgtcactctcattctgttttatctatcttgatgtaaagtctttgaaagtcaggcacgtgatgttattatataactcaacttgagttctcca

SEQ ID NO: 11833 - DNA, 267 bp, Glycine max
  Clone ID: 701064956H1
catgtatcagatctggagcaggagaatagcgttgggagcgttcgcgtttgtcctgcttttcctatcggcctcagcagacgacgtcgttgtgctctctgaagataacttcgagaaggaagttggtcaggacagaggagctctcgttgagttctatgctccttggtgtggacactgcaaaaagcttgctccagaatatgaaaagcttggtagcagcttcaagaaagccaaatctgttttaatcggcaaggttgactgtgatgagcacaa

SEQ ID NO: 11834 - DNA, 265 bp, Glycine max
  Clone ID: 701064957H1
gcaagaatggcacttcgttgcttggtgatgtccctttctgttctcttcactcttggtcttgcgagagaaagccatgccagagacgaagatttttggcatgctgtttggccaaacactcccattccaagttcattgcgagatcttctaaagcctggccctgcaactgttgcaatcgatgatcaccctatgcaaattgaagaaacacagtacccgaaaaccttcttctataaagaagaccttcatccaggcaacacaatgaaagtac

SEQ ID NO: 11835 - DNA, 264 bp, Glycine max
  Clone ID: 701064958H1
cctttctcccctacacaaaacatggctttgcccaatcagcaaaccgtcgattaccccagcttcaagcttgtcatcgtcggcgacggtggcacaggaaagacaaccttcgtgaagaggcatctcactggtgaattcgagaagaaatatgaaccgaccattggtgtggaggttcatccgttggattttttcacgaactgtggaaagattcgcttctattgttgggatactgctgggcaagagaagtttggtggcctcagagatgga

SEQ ID NO: 11836 - DNA, 265 bp, Glycine max
  Clone ID: 701064959H1
ccaaaacgtgatcaaagctgtgaagaaactcaagtcgtggtccaaaaagaaaaggaagaaaaagacccatggccatgagcatcctcctcactattgctgcagctgctattgttcctcatccatccaaccatcagctccattcttaccttcatcctcatgccttgattttgaatacagcaactatggaacattcttaccaaccccggagccggagccggagccggaaccgcaaccacaagagattgccagcctaaactcatcgtat

SEQ ID NO: 11837 - DNA, 265 bp, Glycine max
  Clone ID: 701064963H1
ctaaatgttatgttttattgattatttggcccttatggccctatcagttgataaggttgaaattgagggtttattattgaatattgattgcctggccctatgtggtcgacatggaacggttattttgtccatgtcattgcattaaaagcattatgcatgagtttagattataaattattttttttgtaccaatagatgttaataatttgtgttgaaaccgtgtttttgaatttgtgttgcagagtatggtaactgcgaatttccc

SEQ ID NO: 11838 - DNA, 272 bp, Glycine max
  Clone ID: 701064964H1
cctagattcagccacagttggaaaaaaaaaaaaagttgtccgagatggcacgtacgaagcaaactgctcgtaagtccacaggaggaaaggcacctaggaagcagctcgcaaccaaggctgcacgtaagtctgcaccaactactggtggtgtcacgaagccacatcgttatcgtcctggcaccgttgctcttcgtgagattaggaaataccagaagagtaccgagcttttgatcaggaagctccccttccagaggctggttcgtgaaattgcc

SEQ ID NO: 11839 - DNA, 266 bp, Glycine max
  Clone ID: 701064965H1
atcatttcatttcccatataaaaaggcacacaaagtattaggaataataatatattaacaacaacgacaatataataataatttctttctccattaataaacagagcctgctctgtttcttcttcttcttcttcgcaaaatgatgccgaaacaaccgatgaacgttttgaccacaaaaccttcacctttgagcaccatggtggtgatgctgatcctctgcattctgggtttctacgctctgcatttccctcactcttccacacatt

SEQ ID NO: 11840 - DNA, 275 bp, Glycine max
  Clone ID: 701064966H1
ctctcaaacacctcaacttcatttctctgctccaaagtctcaatcttttatccaaaaactcaaatgggcatggccacaatcacaatgggaggcaaccacaattcctccatcactccacgccactacaacacctacaaggtgttccttttctgcaactacattctcttgggtgcagcttctagctgcatcttcctcaccctctctctgcgcctcattccctctctctgcggcttcttcttcatccttcttcaggtctttacgattgccggcgcggt

SEQ ID NO: 11841 - DNA, 268 bp, Glycine max
  Clone ID: 701064970H1
ctccaacctttcactttcgcttctcagtcttattcgaatccctctctcaatctcctttccaaatggccagcgtttctgttgcacagcaaacaccaacaacagttccagacaatgatacaaccgaggtaagcaagacccaggaaacaaccccagtcactgaggctcctgcaacagaacaacccgtagctgaggttcctgcaacagaacaaccagccgctgaggctcctgccccagaatcaaccaccgaagcaccataggaagaaaccac

SEQ ID NO: 11842 - DNA, 264 bp, Glycine max
  Clone ID: 701064972H1
ctctatactataggtctcgcccaatacctactctccgctcccaagagcacgcaccaccactattgcacttcttcctcgttctccctctttttcttcttcttcgctaaacccttttttctatctcactaacacaacaatgggagacgagaagaagggcaagcctgctgcttccggcgtgtggtccaccatcaagcctttcgtcaatggtggagcctccggcatgctcgccacctgcgtcattcaacccatcgatatgatcaaggt

SEQ ID NO: 11843 - DNA, 267 bp, Glycine max
  Clone ID: 701064973H1
actcgagccgaatcggctcgaggatccatctcttgtttcttgctacctttcttcaccatgacacttgctgggaaaatcacacactgaaatcggggttcatgcaaccgctacaaagtggttcaacctcttcgcaacacaactccatcatgttcaaaacctaactgatagagtgcatggaaccaagctgcatcaaggtgaagactggcatcacaacgagacagtcaagcactggacttataccatagatggtaaggttacaacatgtct

SEQ ID NO: 11844 - DNA, 262 bp, Glycine max
  Clone ID: 701064974H1
cgaggaggatgatgatgagtaaagatggtgatacatgatgaagcgtaggtggatgcgggaaaagaaaattgttttgcatagttgttgggtttagaatttcataggatggttccctacccacatccttttctgataattagtttctgaatttttattttgtcctccctcagtaggtttagattagtgcacaatcgtaattagggtttaatatcatgatcctgtacttaaagtcaatgttatgatacgtttctattctattctc

SEQ ID NO: 11845 - DNA, 261 bp, Glycine max
  Clone ID: 701064975H1
cagaaacatcttcaatcagtctcctctcctataacaatctctaaatcaagtttgaagccgagaaaataatcatggccggtggtgcaaatttcgtgcaaagggttctctcttacgtggtgaatgaagtggttatcaatggtcttgccaacagccctgcatttcagacgtttgcagtgaggacatcaaaaagaattgaagatatttctaacaaagctgttcagaagaggcaggagctagctgagcagatcaaggacatctcga

SEQ ID NO: 11846 - DNA, 263 bp, Glycine max
  Clone ID: 701064978H1
ccacaacagagcataagcatcttctctgagcttcttagttctcagttctcaccttttttttttccttcaccaatcagggaaaaactcagaaatttaagatatggcaggtgcaagacccagtggcatgatcaatggtggaagaagcttcccaaggagattctctgggcgtccaattccaaagcgtggacaagtgaaactcggaatagttgtggggcttgcaaactctgttgcttccattttctctcgcagcagagccaccagag

SEQ ID NO: 11847 - DNA, 266 bp, Glycine max
  Clone ID: 701064979H1
cgagacaaagccatgccagacacgaagatttttggcatgctgtttggccaaacactcccattccaagttcattgcgagaccttctaaagcctggccctgcaagtgttgacatcgatgatcaccctatgcaaattgaagaaacacagtacccgaaaaccttcttctataaagaagaccttcatccaggcaaaacaatgaaagtacaattcagcaagcctccctttcaacaaccatggggtgttggtacatggttaaaggaaattaaa

SEQ ID NO: 11848 - DNA, 267 bp, Glycine max
  Clone ID: 701064980H1
cacgaatttcattgcagagtgttattttgagtatcagcatcaatggctccaattgcactgggaaacgtgattccagacggcattttggcttacttggatgaagaaaacaaaccccaaactgtctccattcactctctcgccaccggcaagaaagtcatcatctttggggttcccggtgccttcactcctacttgcagcttgaagcacgttcctggcttcattgagagagcagaagagctgaaagggaagggtgtggacgacataatc

SEQ ID NO: 11849 - DNA, 269 bp, Glycine max
  Clone ID: 701064981H1
ctcatggcggagattgaactgaaaactgcacctgctgattttcgtcttcctacaacaaatcaaaccagacattgtttcactcgctacatagagtttcacagatgcttggcagcaaagggtgacaactctggtgaatgtgagagatttgctaaatattaccgctccctttgcccgggtgaatgggttgaaaggtggaatgaacagagggagagtgggacttttccaggacctctttgaaatcatgtggcacttggatatccttctgaggc

SEQ ID NO: 11850 - DNA, 267 bp, Glycine max
  Clone ID: 701064982H1
atttaatttaatttgtgtccacatgagaacgtcttatctgcattttctatctcgcaacaccgcgataatggtataaaatagtttcagatacgttgcgttgattgattggtatgaagtgattgactttttttcttcttctattctcacacatacccatctactccttccctcatggctgaacaatcttccaactccatttacgatttcactgtcaaggacatcagtggaaatgatgtgagtctgaatgattacagcgggaaggttcta

SEQ ID NO: 11851 - DNA, 271 bp, Glycine max
  Clone ID: 701064983H1
gctaactccagcaacaacaacaatagaagaggaagaactaggaattccttttgttgttgttgttgttgttgttgtccttgcccctctcctcttctttgatgggttccgaggtctccaaacaggttgagagacgaaaggcgatccacacagagggaaaaactctgtctgatcttagaaactctggggaagattaccctggctcagattatcatccctcagacagaaaaaaatggatgtctgagctcaaccctgagaaagttgtgataaaaca

SEQ ID NO: 11852 - DNA, 269 bp, Glycine max
  Clone ID: 701064984H1
cccgagcagcgagacacagaacccctagcaaaaatgccggctggtcacggtctgagatcccgcaccagagattccttctctcgtcccttcaggaagaagggtaccatcgccctcaccacatacctcacaacctaccacgtcggcgattatgtcgacgtcaaggttaacggcgccgtccacaagggaatgcctcacaagttctaccatggccgcaccggtcgcgtctggaatgtcaccaaacgtgctgttggggtcgaagtcaacaagca

SEQ ID NO: 11853 - DNA, 267 bp, Glycine max
  Clone ID: 701064985H1
tctgcttcactcttcacttcgcagcttcagatcttctccatcctctgaatcaagttttgactttatttgaagagtttctcaaatgcactttccttccaaaatgagccggccaatggaggaagatgctgcgggtaaaaatgaggaagaggagttcaacaccggaccactatctgtactcatgatgagtgttaaaaataatactcaggtactgataaattgtcggaacaacaaaaagcttctgggtcgtgtaagggcttttgacaggca

SEQ ID NO: 11854 - DNA, 266 bp, Glycine max
  Clone ID: 701064986H1
ctcagttgcaggaaaaatggtttcgctgaaactgcagaagcggctcgccgcgagcgtgctcaagtgtggcagaggaaaggtttggcttgaccccaatgaagtcaacgaaatctccatggccaattctcgccaaaacataaggaagctggttaaggatgggtttatcatcaggaagcccaccaagattcactctcgctcacgtgctcgtcgaatgaaggaagccaagaggaaaggacgtcactctggatacggtaagcgtaagggta

SEQ ID NO: 11855 - DNA, 265 bp, Glycine max
  unsure at all n locations
  Clone ID: 701064988H1
cgcggaaccatgatggctgcgtatttgcgtgtatccatgcccacttccccacagtcccccaccactacgaggacgagatgcagaaatctgaaaacttcttgctccgttaacagacccaaaattccaatgccccctctcaaccctaaagacccctttctctccaagctcgcttccgtcgctgcttcttcccctgaaacgctcctcaacactcccaaaaactccgacacccttccttatctcgacatcttcgactcncccaaactca

SEQ ID NO: 11856 - DNA, 260 bp, Glycine max
  Clone ID: 701064989H1
ccaaggcaggggttaacttctatacacagattaagacaataacacaacaatggaaggattcaactggtggtagcaagattaacttggcaatgccaacctctcaaaaataatgttgatagccagagcgtgtaataaggctgtttctgaagtctttgttctcttgaaaaaaatgtcaaaggtcacctgctatgctttgttttgaaacctttctcttttctttttcctgatcttatctgtctcttgtgtctccacgtggacaa

SEQ ID NO: 11857 - DNA, 257 bp, Glycine max
  Clone ID: 701064990H1
accgtaccgtgttgcctctctgcaatctacagccaaaatgcctttcaagaggtacgttgagatcgggagggttgcccaaatcaactacggcaaggaatatggcaggctcgtcgtcattgtcgacgtcattgatcagaacagagctcttgccgatgcccctgatatggtgaggtcccaagtcaatttcaaaaggctttccctaaccgatattaagattgacattaagagggtccctaagaagaaagatcttgtcaaag

SEQ ID NO: 11858 - DNA, 251 bp, Glycine max
  Clone ID: 701064991H1
ctttgtttgcttctcaagtctctcgaagcctctttctctctcttctaggttcgtttctctctcctcctcgttcttgtttcttcggtgattttatgtgtgtgtttgtgtataacggtggtcgtgtgttttgagtagcttgaaacacgtttgacgaacgatgttttactacgttgttgtgtcttgtctattttaaatcatagtcttgtaagttcgtagatcgtgaatttgcttatgatttatttcttagatat

SEQ ID NO: 11859 - DNA, 261 bp, Glycine max
  Clone ID: 701064992H1
gtctctcgtgtcattggaatgattcctggtatggggaaggttactcctgctcaaattcgagatgcagagaagaatttgcagaacatggaagctatgatagaagcaatgacccctgaggagagggaaaagccagaactgttggcagaatcccctgtcaggaggaaaagagttgctcaggattcagggaaaacagagcagcaggtaagccaacttgtagctcaacttttccaaatgcgtgttcgtatgaagaacctgatgggt

SEQ ID NO: 11860 - DNA, 262 bp, Glycine max
  Clone ID: 701064993H1
caccactcttaatttctctctgccttgctcatttacacacctctccaacctttcactttcagctttatttgaatccctctctctcctttccaaatggccagcgttgaggttgcacatcaaacaccaacaacagttccagaaaatgaaacaaccgaggtaatcaagacccaggaaacaaccccggaaccagtaccagccactgaggctcctgcaacagaacaagcagcagctgaggttcctgctcaagaagaacaacaagcaa

SEQ ID NO: 11861 - DNA, 262 bp, Glycine max
  Clone ID: 701064994H1
ccgcgttctatatattattgaattgacaatgaggcctgctcttgctttgcttcctcttctatttgctctctcgttagctgccactacagaatcaagaaaagatacaggggaatattggaaaatgatcatgaaagatcaggaaatgccagacggacttcaaggtcttgtttcatttcaatctgaaaataaccctaagactcaagagcagcttggtaaaggttccaaaaaccattgtgaagagtctctagttacaaatacacaa

SEQ ID NO: 11862 - DNA, 263 bp, Glycine max
  Clone ID: 701064995H1
cgaaaaacgaagaacatgggtttgggtagtgaggttgaagacgatcttcatcgccttcgttatctttcttctcttctccatcagattgacgagcttatcgtgcaagccattgaagtgaattacaacaacaacaaaaccataagcaaagagggcaaaacgcaaattgagtctttttctcgtgtcctttctgacatgctctcttctttggagccatgggttcccaaaattcaaaaagcccttaaccctcaaaacacagtttctga

SEQ ID NO: 11863 - DNA, 256 bp, Glycine max
  Clone ID: 701064996H1
cttgcttccgggagctctgaacttgaccgacgtcgttttcacatcaaaacccttcaacaaaaaaatggcgttcttcttgaaccaaactagtatcgcttcccattttcgatctcactctcagaagactgaagatttggcttcttttcctcgccgtcgattccacgtcgaaccaggggctcgtgaaaaagctctcttggcagaagatgcaactctgaaaccgttcaaatcgtacaagaagagtgtaaaaaagcttaga

SEQ ID NO: 11864 - DNA, 303 bp, Glycine max
  Clone ID: 701065001H1
caacagtttccatctctctcacaaaatgacaacaatatcaaattgctcccttctcttcctcttcctcttcctctccaccctccacatagcttccaccctctcaacccccaccaacttcatcaagtcctcctgcagcaccacccagtacccagccctctgcatccagtccctctccgtctacgcctccaccatccagcaagacccccacgagctcgtccagacagccctctccctctccctcaaccacaccgaggccaccaaaaccttcgtcgcaaaatgcaacaaattcagaggcctcaaacc

SEQ ID NO: 11865 - DNA, 247 bp, Glycine max
  Clone ID: 701065002H1
ctcgagatgacagcaataagtgcctacttcctctgccttataattcttgtgacgcttttacctggtagcattgacagtgcacgagcaaacgtgaagccaagccattatgctggagccttcaataggagtgcttgtccttctggttttctatttggaataggttctgcagcttaccagatagaaggagcagcagctataagatggcagaggacaacgtatatgggacactatattaaacagcaaccag

SEQ ID NO: 11866 - DNA, 295 bp, Glycine max
  Clone ID: 701065003H1
gtaaaataattggagaggaaatggacttcgacacccttttgaagtttattaatgagctaagtggtcacatcaaccttgatgcaaccctcagagatgcagaggctctatgcatatgtgctggtgagaacggtgctgctcgcatacctcccggaaccccaccatcgttgcctgttgaagatggttctttttacgcccaacaagaacaagatgaaatattgtaaataaattcacatttataataaattgtttggtgatacttgaatatatcaacctaattgtgtatttcctcattcca

SEQ ID NO: 11867 - DNA, 290 bp, Glycine max
  Clone ID: 701065005H1
ggaagagagagggagattctttgtttgctaccttctctcggaaaaatggttacgttcaggtttcaccagtaccaggtggttgggagggctcttcccacggaagcagatcagcaccccaagatctaccgaatgaagctctgggccaccaacgaggttcgcgccaagtccaagttctggtattttctgaggaaactgaaaaaggtgaagaagagcaatggccaagtgcttgccacccccgagattttgagaagaacccaaccaaaattaagaactatggtatatggttgcgg

SEQ ID NO: 11868 - DNA, 287 bp, Glycine max
  Clone ID: 701065006H1
gtttgataaaatattgtacacataaatctagctccaattcctaatcacctggttaatttcttcacatagagctatcaagatccaacgttaacatgaagaatgttttagtaaggtcagctgcgcgagctctgcttggcggcggtgggcggagctactaccgccagctctcaacggcggcgatcgtggaacagagacaccagcacggtggcggcgcgtttggaagcttccacttgcggaggatgtccactcttccagaggtaaaggatcagcactcagaggagaaaaag

SEQ ID NO: 11869 - DNA, 290 bp, Glycine max
  Clone ID: 701065007H1
ggcagcacttggtgggaatcgtgatgtgacaggaagccagaacagcgttgagatcgatgctctagctcgctttgctgttgaagaacacaacaaaaaacagaatgcccttttggagtttgaaaaggtggtaactgcgaaacagcaagtggtttctggtaccttgtacaccatcactttggaggcaaaagatggtgggcaaaagaaggtttatgaagccaaagtttgggagaagtcatggttgaacttcaaggaggtgcaagagttcaagcttgttggagatgcacctgcat

SEQ ID NO: 11870 - DNA, 288 bp, Glycine max
  Clone ID: 701065008H1
caaaaccctagcagccggcgagaatggcagacgttgaggttgatgcggcggcagcggcaggggcagcgcagcgaagaagagaacgttcaagaaattcagcttcaggggcgtggatctggacgcgcttctggacatgtccaccgacgaactggtgaagatgttcagtgcgcgtgcacgtagaaggttccagagaggtctgacgaggaagcccatggccttgattaagaagctccgcaaagctaaaagggaagcaccagcaggtgagaagccagaaccagtgcgcaccca

SEQ ID NO: 11871 - DNA, 290 bp, Glycine max
  Clone ID: 701065009H1
gatcgagataactagaaacagtgtgatgaaaatgaaggtccttgtcttcttcgttgctacaattttcgtagcatggcaatgccatgcgtacgatatgttccctctccgaatgaacactggctatggtgcccgtactccggaggtgaaatgcgcaagttggaggcttgctgtggaagcacaccacatctttggctttgagaccattcctgaagagtgcgttgaagcaacacaggaatacatccatggcgaacaatatagatcagactccaaaacagttaaccaacaagctt

SEQ ID NO: 11872 - DNA, 288 bp, Glycine max
  Clone ID: 701065010H1
gagagagagagagagagagagaggtatcacagtgaaacgaagaagctctaactacgcacgcactcattcttgagatagctcaatattcattcgtccatggcactctcttctcgtctcttttccaaatccaaattgatctatggctgtcaaatacttctgcaaaaggagcatgctattccagttcgtcactttgctaaagagtctgcccctcctgcccttaagggagatcagatgctgaagaacatttttgtggaggtgaagaacaaatttgagactgccataggaata

SEQ ID NO: 11873 - DNA, 290 bp, Glycine max
  Clone ID: 701065011H1
gtcctcttgaaaccctactacagcaccacacttccccctctcaattcatctctctctcgatttacattccagagatagaagaagacagagagcaatgacagcaacaacagagagcgagaagaagaagcgagaagaagaagaggaaccagaacaagttgtgaacccatgggaagtttcagccaaaggtaaaatcgattacgacaaactcatagatcgtctcggttgccagaagctcggcgaagcctgaatttcgcgtctcgagcaactcacctctcgcactcctcacgtct

SEQ ID NO: 11874 - DNA, 280 bp, Glycine max
  Clone ID: 701065012H1
ctgagaatgcaaagccgcatgcagttgctggagtatcaagagatgtgattgtagagaaaaaaatgacttttgtgcttgtgctcctcaacttgatgatgatcaacaagtttagctagccattcctgggattaatatttaatttgcttttgttgatctttcaagtttcaacttcattgttttttcccagggaaatttggctgtcctgtttgtggtccttgaactatatttgatacatgctgtaacgcttttgagcaatggatatacttccattgtgattcac

SEQ ID NO: 11875 - DNA, 176 bp, Glycine max
  Clone ID: 701065013H1
gttgtcttgccttgtgtggagctttatccaatcactgtgtgtggtgtgtgcttaagttaaaaacttgccttccaattaatgtaacgagtgtctcctttctcatttccttttgccacagaattgtgagagtcagttgatatctttgtatgtgacttcaataaattttaataaaagaa

SEQ ID NO: 11876 - DNA, 290 bp, Glycine max
  Clone ID: 701065014H1
attgcaaatgacgaactgtcttcaactcatccaattaggcttggccttgcacttaacttctctgtactttactacgaaatccttaactctcccgatcgtgcctgcaaccttgcaaaacaggcttttgatgaagctattgctgaattggatacactgggagaggagtcatacaaggatagcactctgatcatgcaactccttcgtgataacctcaccctttggaactctgacatgcaggatgatggagcagatgaacataaagaagcagcaccgaaacaggatgaccagta

SEQ ID NO: 11877 - DNA, 265 bp, Glycine max
  Clone ID: 701065016H1
atcatttcatttcccatataaaaaggcacacaaagtattaggaataataatatattaacaacaactacaatataataataatttctttctcccttaataaacagagcctgctctgtttcttcttcttcttcttcgcaaaatgatgccgaaacaaccgatgaacgttttgaccacaaaaccttcacctttgagcaccatggtggtgatgctgatcctctgcattctgggtttctacgctctgcatttccctcactcttccacacaa

SEQ ID NO: 11878 - DNA, 299 bp, Glycine max
  Clone ID: 701065017H1
agcactcaccctcattaccaacacgaaagcatagccaaaaccttttttcgaagtctctgattttcctaatggctccggcaaaggcagagaagaagccggcggagaagaagccagcggcggagaaggcaccggcggagaagaagccgaagggccagaagaagatctcgaaggaaggagggagcgagaagaagaagaagcgcacgaagaagagcgtggagacctacaagatctacatcttcaaggtcctcaagcaggttcaccccgacattggtatttccagcaaggccatgggcatcatg

SEQ ID NO: 11879 - DNA, 296 bp, Glycine max
  Clone ID: 701065018H1
tgtcagcttgtcatctaaaattttaactatcatcgcctgacatacaaaccaatctacatggcagcttattattccggttcttaccctgcgtcgaccaagcctatttctctgcttcacaccgtgcggaaggtacaagcaaaaccgtggaagaaggcggcagtggcgccaccggcaccgacaccgatcagagtgtacaaggtggacgctatcaacttccgtgaccttgttcagcagcttaccggtgcacccgagttcaagccagctgatcaggaacaacatcaacttttcccaagtgt

SEQ ID NO: 11880 - DNA, 272 bp, Glycine max
  Clone ID: 701065020H1
cgctcgacgctcctctgtcggtcatggccagtcgcagcccatagtggggactctcttgacagccagtcggcacccgaacttcgtggattatcttcccgtcttgacggtgtctcatcgacaaggcattcggaggcagagcacgaagtagattgacaagttgttcgatgtgttggcccctatgactgctgaacgcatgacgcggagcgaagacacgggttatgtcactaggcatgacatgttagatatcttgctggatatttctgaccagagta

SEQ ID NO: 11881 - DNA, 275 bp, Glycine max
  Clone ID: 701065021H1
cttactggatccgcatgaaaaccgacaatagcatcaggtacaatactaagcgcaggcactggcgccgcaccaagcttggattttaaggtccatgccaacctccgactcgagatttttatcttggttttggttttctagaatgtcacgagcgatgtgggaaggttgtagctttggtcatgtggttacacagaatgatcactgtagagcgtttccataaccctattttattattctatttttttggctattaatgtgaaactgtgatggtagttttt

SEQ ID NO: 11882 - DNA, 286 bp, Glycine max
  Clone ID: 701065022H1
cgattttaagataagaaccattgagcttgatggcaaacggatcaagctccaaatttgggatactgcagggcaggagcggtttcggacaattacaactgcttactaccgtggtgctatgggcatattgctagtctatgatgttacagatgaagcatcatttaacaatatcaggaattggattcgcaatattgagcaacatgcttcagacaatgttaacaaaatactggtggggaacaaagctgatatggatgacagcaaaagggccgtgcctacgtccaagggccaa

SEQ ID NO: 11883 - DNA, 285 bp, Glycine max
  Clone ID: 701065025H1
ctcgagccggtctagattcagtagagatcgtgatggctcttgaggaagagtttgggttcacgattcctgataatgaggcagacaagatcaactccattaaacttgcagtggacttcattgcatctcatcctcaggcaaagtagtggaattcgtgtataatttttcttttgtttctcaacatctagtttagatgacgcatcgacatttttgcttccaaagtggaactttgttttctcatccctcagaagagtgttagctggggatgtgccagcttcatttggcggt

SEQ ID NO: 11884 - DNA, 285 bp, Glycine max
  Clone ID: 701065026H1
catacaaagcattgaattcaaaaactaagttcatttcttgtgctttgctttattcctcaaaaccaaacatgtcgaacacatgcggcaactgtgactgcgctgacaagactaactgcaccaagggaaacagctatggtgttatagtagagactgagaagagctacatcgagactgttgacatggatgttccagcagctgagcatgatgggaagtgcaagtgtggcactaactgcacttgcacggactgcacttgtggccattaaggaatatgtatgacaatgtaat

SEQ ID NO: 11885 - DNA, 287 bp, Glycine max
  Clone ID: 701065028H1
gacaaatttaagatatctggctgaactcccacaaaatgttgatttggtgactatgagacctctcattcatctctaatctcttggtgatgcccgccgtggtcaatgacatgaaggaaaatgcagcattagtgactttggttaaaccacaatttgaagctcgtagatctcaagtaggaaaaggaggaatagtgaaagatcctgctgttcatcaagaggtccttgagaagattataaagggagtagagaattttggtttctgttgtataggttggattgagtctcctctg

SEQ ID NO: 11886 - DNA, 178 bp, Glycine max
  Clone ID: 701065029H1
tggatagttgtcacttgtatagagatgtattggtggaatggctattgttcatgccattgcttggactttgctacaattctatttatgaagtagcaaatttttctattgagcttcccagttataactttgcacatcaatgtccatttggccaggcattagttcaataaatccatcttgc

SEQ ID NO: 11887 - DNA, 273 bp, Glycine max
  Clone ID: 701065030H1
gtcagatcatatatcacaagggcattgtagcaacagctctggattaagtacaccagagaaccgtactctcgaagatgatgaggatatattctcaaaaatggaatcttccagaatctgcaggaaatatcagatggggttatcgtgctctgatgctgaggttgactacaggagaggaagaagcttccgagaagaaaagggaatgtgatttataactagaattaatcagttgagaacagattgtctgttatctgtgtattaatttgtagcttttgt

SEQ ID NO: 11888 - DNA, 292 bp, Glycine max
  Clone ID: 701065031H1
aaaggagtgatttggagtttggagcgactgaactaatcattaatttgcactcgctgtttcagcttcatcacccttcttttgcatcatttatatctcttgagaaatggcacaagaaacctttctattcacatctgaatctgtaaacgacggtcaccccgacatgctgtgcgaccagatctctgatgcagtacttgatgcgtgccttgaacaggaccctgacagcaaggttgcctgtgagacatgcaccaagaccaacatggtcatggtcttcggagagatcacaaccaaggcc

SEQ ID NO: 11889 - DNA, 298 bp, Glycine max
  Clone ID: 701065032H1
cccaattcccttcgtcgttttcgattaagagagcaatggcacgtaccaagcaaaccgctcgcaagtccaccggaggaaaggctccgaggaagcaattggcaaccaaagccgctcgcaagtcagccccggcgaccggcggagtgaagaagccccaccgcttcaggccaggaacggtggctctgagggagattcgaaagtaccagaagagcaccgaacttctgatccgaaaactcccattccagaggctcgtcagagaaatcgctcaggatttcataaccgatctccgctttcagagcag

SEQ ID NO: 11890 - DNA, 289 bp, Glycine max
  Clone ID: 701065033H1
cggccttgagctttgctttctctctttctttgctctcttttcttttaggtttccactctctctcacacacacactctgcaacaatctctcttctcttcttcagtctctcaactactgcctaaccaaaccttccatttccggaggcagtttcttaaatttggagtctgatgtctccgccactgctggttactgaagaagacgaaggacagagcaatgcctcgatggtagcatctgcatcttcaccctcctcggagtgtctcaccctaaatgaggctagattgacagaacg

SEQ ID NO: 11891 - DNA, 292 bp, Glycine max
  Clone ID: 701065034H1
cctcgagtcgattcggctcgagtgattggtgtgcatccatgtgaaactagtggcgatcggatccagctagagcctacaagctcacagttttggtttggtttgcttgattgaagatcaaggaaggaagatgttgggtgttataaggcacaagagtattcgccccgccttctccgcaatcagagacttctcttctgcagctaaagagattactgtcagggatgctctcaactccgcactcgatgaggaaatgtcagctgatcctaaagtcttcttgatgggtgaagaggttggg

SEQ ID NO: 11892 - DNA, 288 bp, Glycine max
  Clone ID: 701065035H1
caaatttatcatttcaaagcactctccaatagagataagtttgattcatccatcccagttggttggttgtacaccggctctggcactgttaaaggtttcaatctctcattgttgccagcttttgtgtacatgccagtttatagcaacctttaccacttcttttaaaccaaaacaataagcttttttcccttcattgttgtctcagaaaaaaaatggccccttctggaaggacaacaacagcatcaacaaggacaacctcatagacgacaacaacaacaagaagaacaa

SEQ ID NO: 11893 - DNA, 283 bp, Glycine max
  Clone ID: 701065040H1
cctcgagccgaatcggctcgagcgagctcgagtgatgctgaaaaccacagttccgaagccggacttcggcttgtggaaagcttctcagcatgcagtgttgagtctgttcagccaactaaggttgattcccctcctagcagtgtgtcaacaaatggggtttcttccccttcagtgccagcaaactcagaatcatctgatgctgctgcttccaagtctcccattcaggagcaagtttcaggcaccaaagaggacaaaaatgtggataccaaagatagtgagagtg

SEQ ID NO: 11894 - DNA, 279 bp, Glycine max
  Clone ID: 701065046H1
ctcgcgtgtatgttggtaacttggattcacgagtcaccgagagagatctcgaagacgaattccgtgttttcggagttattcggagtgtttgggttgcacgtagaccagctggtcatgcttttattgactttgatgaccgcagagatgcacaggatgctatccgtgaattggatggcaagaatggttggagggttgagctttctcacaactctagaggtggaggtggtggtcgtggtggtcgctctggtggttctgatttgaaatgttacgagtgtggtg

SEQ ID NO: 11895 - DNA, 286 bp, Glycine max
  Clone ID: 701065047H1
tgagagagagagagagagagagagagagagaaatggcttcgcatgcaattgtgggcttcaagagctgactcttacctgaggatctctgtgtttcacagaggcttttctaatgttgttaaagatttgaagtatgctgattctcatgagtgggtgaaagttgatgaaaattctgcaagcgtcggtataactgatcatgcccaagatcatttaggtgatgtcgtatatgttgaattgccagaagtgggagcagctgtcacacaaggaggtagttttggtgcagttgaaa

SEQ ID NO: 11896 - DNA, 296 bp, Glycine max
  Clone ID: 701065048H1
ggttctagcacactcccctctcaggttattgtggataagattgagctataatggctgccaggagaccgggtttgattgctttgtttgatgttgatggaactcttacagctcccaggaaggtggtcacaccggagatgttgacattcatgcaagaactgcggaaggttgtaactgttggagttgttgggggttctgaccttataaagatatcagagcaacttggcagcacagttaccaatgactatgattatgtattttctgagaatggtcttgctgctcacaaggaaggaaagctc

SEQ ID NO: 11897 - DNA, 283 bp, Glycine max
  Clone ID: 701065051H1
aaaatgtggaagagaacgggttttgaagaagaagcagttcaattgatcaactcagatttcagggacctaagtctagctgctaatagactcgcccatcatgccatcaaacttggtggcattggctttggagcctcttttttcggattgtttgctgccattgctgctatttatctgttgattttggatcgtacaaactggaaaacaaatattctcacagcactactcattccatacattttcttcagcttgccttcattaattttcgacgtcttcaggggagagc

SEQ ID NO: 11898 - DNA, 258 bp, Glycine max
  Clone ID: 701065052H1
tccggtgatgggtatagggttgaggagaataacggctgcctcatgcttggctggcacactaggccactcatcgctacctccgcttggaagcttccctcctcgcagcgagtctagtggcttgactcagtgaatgtaaaactatagattaattggacttgttccagtgaactgagtcagtgaccgagtcagtgagccttccaggcagcaagaggataaataaatgatctcgcgaacaaaaaaaaacaaaaaggggggccg

SEQ ID NO: 11899 - DNA, 280 bp, Glycine max
  Clone ID: 701065053H1
cttttgcttcactctacgcagatcgcagcaaaccagagattgaaacccgacgatgcctcccgtcgctcctcgatccggcgatgccatattcgccaacgtcgaacgcgtcaatgcggactgtttactttgacgtatggcgcaattgtgcgtcaattgctcacggatctggaagaggttgaggaggttaacgagcagcttgatcaaatgggttacaatattggaatccgattgattgatgagtttttagctaagtctaatgtctcaagatgcaacgatttca

SEQ ID NO: 11900 - DNA, 103 bp, Glycine max
  Clone ID: 701065056H1
gtggtggatcattagccaaattttaccttttgcctgcttcttcgttagtggtgtattttcatcagcttcgatctgcttctgcataaaatttatcactcgttgc

SEQ ID NO: 11901 - DNA, 278 bp, Glycine max
  Clone ID: 701065057H1
tcaagatcggaatcaacggatttggaagaattggccgtttggtagccagagtggctctgcagagagacgatgttgaactcgttgccgttaacgaccctttcatcaccaccgattacatgacatacatgtttaaatacgacagtgttcatggacactggaagcatcacgatgtcaccgttaaggacgagaagacccttctcttcggtgacaagccagtcactatttttggacacagaaaccctgaagagatcccatgggggtcaactggagctgacatc

SEQ ID NO: 11902 - DNA, 276 bp, Glycine max
  Clone ID: 701065058H1
caaaaatggcacctgcaacactgtctctgtctctcctcctcctgttctcactcagcatcgccgtaaccgttagatcgagcgactacgactacgattgtgtgtacactgcatacgttagaaccggttcggtgttgaagggcggaacggactctaagatcgggctgaagctgtacgacaagtacggctactacatctacattaaaaacctcgaagcatggggcggcttgatgggcaagggctacgactacttcgagcgcggcaacctcgacatcttca

SEQ ID NO: 11903 - DNA, 281 bp, Glycine max
  Clone ID: 701065059H1
ccctgagagagctcgtcgcggcggttgcagaagaagattgcaagatgaagttcaacatcgcgaatcccaccactggatgccagacgaagctcgagatcgacgacgatctgaaactgcgagcattttgggacaagaggatctcacaggaggtcatcggagatgcactcggtgaggaatttaagggctatgtcttcaaaattaccggaggttgtgacaaacaaggatttccaatgaagcagggagtgctgactcctggtcgtgttagacttttgcttcacagg

SEQ ID NO: 11904 - DNA, 278 bp, Glycine max
  Clone ID: 701065062H1
tacaggagagaagggagagtcaagatgaagaagatggtggctgcaatgatgctttttcttctcatttctacgcaaatgaagagcgttgagccggatgctgcggattgcttggatggttgcagtactgcctgtgttcaaagcgactcgaggcttcaagcacggtgtgaacgcaaatgcagcattagatgcggtccagattccacaatcaaggaggacatgagttgatgtgagtatgtcaagtcacagcgcaagaagcagtgtttcatcaccatagtctt

SEQ ID NO: 11905 - DNA, 272 bp, Glycine max
  Clone ID: 701065063H1
cggttagggttttctcaaattgcaagaacatgggtttcaacattcaaccctatgggattcagtccatgctcaaggaaggccataagcacctttctggcctcgatgaagcggttctcaagaacatcgacgcctgcaaacaactttccactatcactcgaactcccctcggtcccaatgggatgaataagatggttataaatcacttggacaagctttttgtcacgaacgatgctgggacgattgtgaatgaacttgaagttcagcatcctgct

SEQ ID NO: 11906 - DNA, 291 bp, Glycine max
  Clone ID: 701065064H1
gcttcttgttgttggaaagaaaccctagcaagcggaacaatggcagacgttgaggtcgatgtggcggctgcagcagcagcagggcagccgaagaagagaacgttcaagaagttcagtttcaggggcgtggatctcgatgcgcttctggacatgtccaccgatgaactcgtgaagatgttcagtgctcgcgcacgtagaaggttccagagaggcctcaccagaaagcccatggccttgatcaagaagcttcgtaaagcgagaagagaagctccaccaggtgagacaccagaa

SEQ ID NO: 11907 - DNA, 286 bp, Glycine max
  Clone ID: 701065065H1
agcaagtgtagatgggagaggaccaagcatatgggacacctagactagacagcatactgaaaagatttgggatcatagcaccggtgacatgggagctgatttttatcatcgatacaagggtgacataaaaatagcgaaagacattgggctggactctttcagattctctatctcatggtcaagaatattcccaaagggcaagggagcagttaacccccttggggttaaattctacaacaatgtcatcgatgagatcctagcaaatggtttaacaccttttgtcact

SEQ ID NO: 11908 - DNA, 158 bp, Glycine max
  Clone ID: 701065066H1
gcaagacctcgagaattcttctgatccgtttcggtcagatcaaaacttgcctctttgcaacgctgcttctgacaaaaaacgttggaccatccgacatgtcggacacagtggaagatagagatcaaagagctgaagcgattctccaatccagagctaca

SEQ ID NO: 11909 - DNA, 282 bp, Glycine max
  Clone ID: 701065067H1
caaccatatctattcttacaagttacatccattgagaaacatgaaggtctcccccttagcattttcaatcctttttttgtccttcaccatagaactcttcattggcattgcttcagcagcacaagaaccagtgcttgacacctcaggccagaagctgagaacaggtgtcaagtactacattctaccagtcttcagaggcagaggtggaggcctaacagtttcaagcagtggcaacaacacatgccccctctttgtggtgcaagagaagcttgaagtctcaaa

SEQ ID NO: 11910 - DNA, 281 bp, Glycine max
  Clone ID: 701065068H1
cttggtttgtgagagagacagacgcacagagagaaaatggttccgcggtcaggaatctgcgcgaagagggtagttgtggacgcgcggcaccacatgctggggaggctggcatcgatcgtggcgaaggaacttctgaatgggcagaaggtggtggtggtgcgctgcgaggagatttgcctctccggtgggctcgtcaggcagaagatgaagtacttgcgtttcctccgcaagcgcatgaacaccaagccctctcacggccccatccatttccgtgcacccgg

SEQ ID NO: 11911 - DNA, 277 bp, Glycine max
  Clone ID: 701065071H1
atggctcccaagggtttaacctttctggctgtgttaatatgcgtttcagcactgatcctgagtccttctcttgcgggggaagggcaaaataatggccttgttatgaacttctacaaggaatcatgccctcaggctgaagacatcatcacagaacaagtcaagcttctctacaagcgccacaagaacactgctttctcctggctcaggaacatcttccatgactgtgctgttcagagttgtgatgcttcactgttgctggactccacaagaaggagct

SEQ ID NO: 11912 - DNA, 276 bp, Glycine max
  Clone ID: 701065072H1
gtttgttgtgagctataagctagtttatcgtgaggagaatatgaagttgtttgtattctttgttgctgcagtagttttagtagcatggccatgccatggcgcaggctaccaaaggttccctctccgaatgacaactggctatggtgagcgttcttcggaggtaaaatgcgcaagttttaggcttgctgtggaagcacacaacatccgagcctttaaaaccattcctgaagagtgcgttgaaccaaccaaggactacattaatggcgaacaacttag

SEQ ID NO: 11913 - DNA, 276 bp, Glycine max
  Clone ID: 701065073H1
ctgcagagagagagagagagagagaaccgacaagcaaacgaaaagtaaatcaatcaatcgttggaatctctcaacttatcgcttcttcctgatttgggggtttccgtttcaatggacgacggcgagctggatttctcgaaccatgaagtgttttcgagtccgaacatgggggagcttccgagcagcggttcaatggacagtttcttcgacgagcttctcaaggacacgcacgcgtgcacccacacccacacgtgcaaccctcccggccccgatttc

SEQ ID NO: 11914 - DNA, 277 bp, Glycine max
  Clone ID: 701065074H1
ctccactccgatgaagcccacgcagaatcagatacaaaaaagataatcaaaattttacttccaaacccaaccaaatcaaagaaatgaaggataaggagacattccctattgcgaaaaaggaagcctctgattcaggtttattcggaagaggaagctacaaattctgggcactagctgccatgctgctcttggcattctggtccatgttcaccggcacagtctctctccgctggtccggcaccctcaacactttctcccacgcgtcccttcacgacca

SEQ ID NO: 11915 - DNA, 278 bp, Glycine max
  Clone ID: 701065076H1
atacaagccaaaagaacaacatggacattgatctttctcctcagttgcccaagaaagtttacggtgccaatggtggctcctactacgcatggtccccctccgaccttcccatgctccaccaaggcaacattggtgccgctaagcttgctctcaacaaaaacgcctttgctcttcctcgttactctgactcttccaaagtcgcttatgttcttcaaggtagtggagtggctggaatagtgttgcctgaatcagaagagaaggttgccgcaataaagaag

SEQ ID NO: 11916 - DNA, 279 bp, Glycine max
  Clone ID: 701065077H1
gtattgtagtagtagccatggggactttcaatcactatgtgattgttaagttcaaagatggtgtggcagttgatgatctcattcaagggttggagaagatggtctttgggattgaccatgtcaagtcctttgcatggggaaaggacattgaaagtcatgatatgctaagacaaggtttcactcatgctttcttgatgacattcaatgggaaagaggagttcaacgcatttcagactcacccaaatcatcttgagttctcgggagtgttttcacctgcta

SEQ ID NO: 11917 - DNA, 296 bp, Glycine max
  Clone ID: 701065078H1
tcggcgcgcttatgggtcccaagctttctcttggcaactttcagtgccctcttatcttttccaaccttgagcaactcagttattcgcttttcataaggtgcaaagaagaagagagaggagatgtccaatgttctccggaagatgagggctggtggagctggagacaagaagaaataagtcttgtttactttttctagtttcactagactgtttcgatgtacgagttgtcttatttttgttttagttcaagattttgctttgagaaatatgttttacctaatcgagacatgatttac

SEQ ID NO: 11918 - DNA, 279 bp, Glycine max
  Clone ID: 701065080H1
tcaggtcaggcggggctacccgcagagtttaagcatatcaataagcggaggaaaagaagacgatagcaacaaggagcgtgcgtgcgtgcgtatgctgctctctatattcagaaccaataagaaagggaaaaagaagcattggtccttaccttagccccttttccttcatttgtttgttggttgggagagcaagggttgactgtttcttctccatattggttgtgaactgatttgtcctttgtattttctaactgatcccttccaacttccaatttttat

SEQ ID NO: 11919 - DNA, 283 bp, Glycine max
  Clone ID: 701065081H1
gcacagaggggaagaagaagatggtgtccttgaagcttcagaagcccctcgccgctagcgtcctaaagtgcggcaagggcaaggtctggcttgatccaaatgaagtcaatgacatctccatggccaattctcgagaaaacataaggaacttggttaaggatgggtttattatcaggaagccgactaagattcactctcgctcccgtgctcgtcgaatgaaggaggccaagagaaaggggcgtcactctggttatggtaagcgtaagggtacaagggaggcaag

SEQ ID NO: 11920 - DNA, 279 bp, Glycine max
  Clone ID: 701065082H1
gcagcgctgagtcgagggcgttcagtgttcagcacagtttacacacgagtacccatttgctcttctcaatttctcagagagaaaatcatggtggacgcagcagaacgtaggtacttggaggatgacgattcatcactcatgaaaactattaagggggcaacaactggtttagttgctggcactatctgggggaccgtagttgccacctggtatgatgtccctcgtgtagagagaaatgttgctcttccagggctgattaggactttcaagatgatgggc

SEQ ID NO: 11921 - DNA, 273 bp, Glycine max
  Clone ID: 701065083H1
agagcgtcgcagtcgcaaccctaatcagaagaagcgcagttcaagcgagtgacagccagcagccatgggtcgtatgcacagccgcggtaagggtatatcctcttctgctttgccctacaaaaggacacctcctagctggctcaagatctcttcgcaagatgtcgaagaaaatatttgcaagtttgcgaagaaaggtttgaccccgtctcagattggtgtcattctcagagattctcacggtattgctcaggtcaatagccgtcctggcagcaa

SEQ ID NO: 11922 - DNA, 273 bp, Glycine max
  Clone ID: 701065086H1
agcttttgcttctttgtgaacatggagatgaggaaatcatgtggcttcttcttcttgctcctcctccttgtctttgcttcccaggtggtggtgcagacggagggaagagtgtgtgagtcacaaagccacgggttccatggtttgtgtaatagagaccacaactgtgctttggtctgcaggaacgaaggtttctccggtggcaggtgcaaaggcttccgccgccgctgcttttgcaccaggatttgttgagatctcatcaaacactactcttgc

SEQ ID NO: 11923 - DNA, 276 bp, Glycine max
  Clone ID: 701065087H1
tcgtaattggctacatagagttccagaggaacgcagagctggacccagcaaagaggctgtacgcaggtggcagttacttcgacccactgggcctggcctcagatccagagaagaaagccacccttcaattggcggagatcaagcacgcccgtctcgccatggtgggcttcttgggctttgcagtccaagctgccgccactggcaagggcccgctcaacaactgggccacccacttgagtgacccactccacacaaccatcattgccaccttctcat

SEQ ID NO: 11924 - DNA, 274 bp, Glycine max
  Clone ID: 701065088H1
gttccctctgtaggtgatggcgagtacaagcacatagtggggactctcttgaaagcaactgggaccccgagcttggtggattattttcccgtgttgagggtgtttgatccacaagggattcggaggcacaccaccaactacattgacaagttgttcgatgtgttggaccctatgattgatgaacgcatgaggaggaggcaagagaagggttatgtcactagccatgacatgttagatatcttgctggatatttctgaccagagtagcgagaaga

SEQ ID NO: 11925 - DNA, 270 bp, Glycine max
  Clone ID: 701065089H1
aataagacactgtcaccgttccgttccgttttcctctgtttttttgttcttgctttcaaatccccgcttcgtggaaatcccgaaccagaaaccatgcttctccgaaccgctgctgcttctgcttcgtccctctccctcttcagcccgaacgccgaacctccccgttcggttcccgctcgtggattggtggttcgcgcagcaccaggatccacgaagcaccgcgccctgaccggagtgatttttgaaccgttcgaagaggtgaagaaggag

SEQ ID NO: 11926 - DNA, 272 bp, Glycine max
  Clone ID: 701065090H1
cttcccccagttgccagatctgaatcacaccttcactcttgcgattcaattactgagtagttgaggatggctccttttgcttttgcaagattgccctcttctcacatctgccgcctcccaaagcccacaaacttgaagtttcgagttcgctgctctactgccgcgtcttctccttcttcggtttccactagatcaaaagctcctggctttgatttgaagacatactgggccaacctaatggtgcagatcaatcagaagctggacgaagctat

SEQ ID NO: 11927 - DNA, 274 bp, Glycine max
  Clone ID: 701065091H1
caaaagattgcatttcaggtacttcctcaatctgtttggattaagaggattctttagtctcatcttgggtgaagaaaatgctgtagatgatacacaacgtatgatgcaaatgggtggatttggatttgatccttcaaaggtacaaatatgagtggtatttttcataattttaaagatcaatcattgaaaattatcatgtgattccatgacttgttgatccccctttcccccggccataccacaaggtaaaagggataatttgtttcagtgtgag

SEQ ID NO: 11928 - DNA, 272 bp, Glycine max
  Clone ID: 701065092H1
ctagttcacagcttcagttcgtttttgttgatcctgtgaacttatacgtgacggggtggttctgttggatacatgggccagcatgtttgggatgagggttaggattgcattagctgaaaagggtgttgagtatgaatacaaggaagaaaatctcaggaacaagagtcctttgcttttgcaaatgaacccaattcacaagaaaattccagttctgatccataatggcaaaccaatttgtgaatctgcaattatagtgcagtacattgatgagg

SEQ ID NO: 11929 - DNA, 277 bp, Glycine max
  Clone ID: 701065093H1
caaaccctcagagatgaagagaagtcctatcttgtaccctgctcttctttctactttgtgccttcacctcatatctaccttcagccaccgctgatgatgatcatgtgtacgacactgacggcgataagcttcaatacggtgtcaattatttcgtgttgccagtgataagaggaaatggcggtggaatacaagtagcaaacgcaggaaacgatacttgccctctgactgtggtgcaatctggcaacgagctctctgaggggttaccgataaagattgc

SEQ ID NO: 11930 - DNA, 278 bp, Glycine max
  Clone ID: 701065094H1
tgtcagttcccacgagcttcaaaccgttgtcatttgctgaggtgtaatacagattgcttggcatggagagtacctcgattccgttgatgaaagcgtaggagtttggttgtgacggagtgaaggtgaggttcaacctctcactgtcgccgtccacattgacgacatattctctgaagatggttttagtgttttccgcttttagagagggcttgaaaacgtggagaagggtgaattggttggattgatcggtgaaggatgcattggagctaggaaaggaa

SEQ ID NO: 11931 - DNA, 273 bp, Glycine max
  Clone ID: 701065095H1
tgctctgcttcaacattgcggaagcagaagaagcgccgcagctatggtgaagtactccagagaacccgagaatcccaccaagtcctgcaaggccagaggcgctgacctcagagttcattttaagaacactagggagactgcctttgccatcaggaagttgccccttgttaaagctaaacgatacttagaggatgttttggcccacaaacaggctattcctttccgacgcttttgtggtggtgttgggaggacggcccaagtctagcacagaca

SEQ ID NO: 11932 - DNA, 284 bp, Glycine max
  Clone ID: 701065096H1
accgtgttctctgccgcacgagataactagagtatagcatatcgcagttacagaaaacatggctgatgtggtgccaaactccgaagaagacgctgcactctccgtcgttcgattcgcctgtgaacttgcctagggcgatgccgatcttgaggttgctgagccccaagttagcagactctgcacggaggctgaagagttcattagttatgggaaagtggttggagttagcatcattgatgattacctctgctgaattgattttctcaaaggtttctgaaaaagat

SEQ ID NO: 11933 - DNA, 271 bp, Glycine max
  Clone ID: 701065101H1
tgctggatttgatgatgagaaatcactacttatgtcacaaatgagcctcgagaaaaggtttggtcagtctgctgtctttgttgcctctacactcatggagaatcgtggcgttcctcagtctgcaactccagaaactcttcttaaggaagctattcatgttatcagttgtggttacgaggataaatcagaatggggaagtgagataggatggatctatggttctgtcacgaagatattcttactggattccagatgcatgcccgaggttgga

SEQ ID NO: 11934 - DNA, 270 bp, Glycine max
  Clone ID: 701065102H1
cttaataccaattttctagggtttatacaattctcgatggcttcttcagatgttgagtaccgttgctttgtcggtgggctcgcttgggccactgacgaccaagctctcgagagagccttctctcagtacggcgaaatcgttgaaacgaagattatcaacgatcgtgagactggcagatccaggggttttggatttgtgaccttcgcctcggagcagtccatgaaacgccatcgaagggatgaacggccaaaaccttgacggccgtaacat

SEQ ID NO: 11935 - DNA, 267 bp, Glycine max
  Clone ID: 701065103H1
ccagcgccttctttctcccaaaggcatcttatactcggaagatacagaacagtataagctgctaaagctaaggactgcctagcctgatgaagtcatcacaccagttacaaggatagaagtatgttttaataaaaaaaaaaagaggatagtagtatgttggaccatctcagcttatgggttaagcgagttaagaccaggacaaccggctaaaaagtgagccatcttttataatttgtttagtccgcgagctgggttggctcataggtt

SEQ ID NO: 11936 - DNA, 260 bp, Glycine max
  Clone ID: 701065104H1
cggctcgagcggctcgagggaggagcaggaggcatcaccgttaccaaacatggtgaaagggcgccaaggagagcgtgttagactttacgtcaggggttcaatacttggatacaagaggtctaagtcaaatcaatacccaaacacctcattaatccagattgagaatgtaaacactaaggaagaagttgcgtggtactgtgggaagcgtatggcttacattacaaagccaaggtaaagaaggacggaagccactatcgctg

SEQ ID NO: 11937 - DNA, 265 bp, Glycine max
  Clone ID: 701065105H1
cgatgcttcatcccctcacaaacccaaacgcaaacgagcttctctcactctcatgctcttctatattccaccacaatgcactcacacacctccgtttctctcaaccccagaacaacaaaaattgctcctcgacgcctaagtcgtcgtttcgggtccgtgagatgctcttacgcttacgtagataacgccaaacttaaggttgtcggcatcggtggtggcgcaacaatgccgttaatcgcatgatcggtagtggtttgcagggtgt

SEQ ID NO: 11938 - DNA, 261 bp, Glycine max
  Clone ID: 701065106H1
ctctctgtcaccgtgttgcaagtatgaaggactgttggtttttcgacaacaatttcaatggtctgtcggatgagagtcttgatgatgtgatggacatggagcttttggatttgccccttgactttgaggatgtggaaactgatgctgtggaagaacaagattgggatgctcagctcaaactccttgaagacccaccaccaccacttggagttttccctacaacaatcctctgcattctgtggacaaactcggaatgagaat

SEQ ID NO: 11939 - DNA, 258 bp, Glycine max
  Clone ID: 701065107H1
cacgtttggacggacgcactccattccatcatcacttaataagcttgctagcatgttctcgcagcctttaatgtttaaatttcagaccgtgttcgcttctttggcactcactatgttgtcttgtatgcctacattttatgccttcaatttgcattcacaatgaaactcaatttactttaaaaaaaaaaaaaaaaaaaaaaaagaaaaaaaaaaaaaaaaaaaaaaaaaaaaaaaaaaaaaaaaaaaaaaaaggggggg

SEQ ID NO: 11940 - DNA, 234 bp, Glycine max
  Clone ID: 701065108H1
caagaacacattcgggcttctggtggtttcagaaactccttcactaaagctcacggcatatcaaattccattggcataatacttctgttggtttatcccatctgggcgctggtggtcatacttttttaggcaccaccatttggacttggttgatatgtgagaattaaaccaagtgtcttctgtatcattcatttgttgcaacttgatatctataaacccggccattgttttgtg

SEQ ID NO: 11941 - DNA, 264 bp, Glycine max
  Clone ID: 701065109H1
cttaaacactcgtcccaagaggcgcagagccaaaagcagaaagaacaaagaagaaattgagaaccaaagaatgactcacattgctgtggaacgcaatagaagaaagcagatgaatgagtatctttctgttcttcgctctcttatgccagactcttatatccaaaggggtgatcaagcttctataattggaggtgctattaactttgtcaaagagcttgacagaggatgcattttcttggtgctcagaaagaaggagaggggaaa

SEQ ID NO: 11942 - DNA, 262 bp, Glycine max
  Clone ID: 701065110H1
caaggtgctactccctgacgccattcttggcactaatatacctcctgcacctgctcctgcaccaactcctgatattgcccctgctgctgattctccaactgaacacagtgcagatagcaaagcatcatctccatcatctactcatgatgactcctcttctcacaagttcatcagctatggaatctgggccaaccttgtcttggcaacttttggtgtgtggtgctcttctgatggcactcttcctattgaatatttaatttag

SEQ ID NO: 11943 - DNA, 262 bp, Glycine max
  Clone ID: 701065111H1
cacggacgcagagccttcgatccagaaaccatgactaagagaacgaagaaggcaggcattgtcggaaaatatggtacccgatatggtgctagtttgcggaagcagattaagaagatggaagttagtcagcatagcaaattcttttgtgaattttgtgggaagtatgctgtgaagaggaaggctgtgggaatatggggatgcaaggattgtggtaaaggaaagctggcggtgcctacactttgaatactgcaagtgctgtcac

SEQ ID NO: 11944 - DNA, 261 bp, Glycine max
  Clone ID: 701065113H1
cggatctaaggcttcagtgtagtctgtaatcatgtcaggcaagtatatcatttctgctattcttggatcatttggagttgcatgggtttgtgattattatgtttcagacaaaaagctatttggaggttctacccctggaactattacaaacaatgagtgggcagaagagactgacaaaaaattgcaggcatggcctcgtactgccggtccaccagtgtcatgaatcccataagtcgccaaaatttcattgtcaagtctcgc

SEQ ID NO: 11945 - DNA, 265 bp, Glycine max
  Clone ID: 701065114H1
cgctgcatctcaacgaaacagagcgagctagagagagagagagagagaaagagaagagagagaagcagcgattcatcacaatgggtaacgttcacggatctctcgcacgtgcgggtaaagtgagaggacaaactcccaaagtggcgaacaagacaagaagaaaaagccacgcggacgcgctcacaagagaatgcaatacaaccgccgattcgtcaccgcgtggtgggattcggaaagaagcgtggaccaaactcctcggagaagt

SEQ ID NO: 11946 - DNA, 174 bp, Glycine max
  Clone ID: 701065115H1
ctataatagcagaatcgtgagtaacagcagagcagaacaccgataaatcgctatgactgctcagacccaagaggagcttcttgcggccgaccttgagcaacaaaagatccatgatgatgagcctgtagttgaggatgatgatgaggatgacgaagatgacgacgatgaggatga

SEQ ID NO: 11947 - DNA, 185 bp, Glycine max
  Clone ID: 701065116H1
gtctttcttggaactttgttactctcacacatgtctcgctccgtgcctttggtttcaaccatttttgtcttgcttctgcttctggtggccactgagatgatggggccaacaatggtggcagaagcaagaacttgtgagtctcagagccaccgtttcaaggggccatgtttgagtgacaccaactg

SEQ ID NO: 11948 - DNA, 270 bp, Glycine max
  Clone ID: 701065117H1
gcaatccctcagtttcatctgttgatcctttagttggaggagaaacagtgttttatggtcaaagaaacaaaactgtggctgaggtggctcctactgaagggacagccctactgcaccttcatggcgataaatgtttgttgcatgaagccagaaatgttaccaagggtgtcaagtacgtgtttcgttcagatgtagtatttgcatgaagtctgaagaatggttaatcttataccaaatatcctggtatatacatctcctgagtcctgaagg

SEQ ID NO: 11949 - DNA, 116 bp, Glycine max
  Clone ID: 701065118H1
ggtatcagcattcagcatcgccttcctaaattcaacgactcggttccgttccctttcttcttcgtcgaaaccctaatcagcatctgcacttcctgctgatgccacttttgttgggg

SEQ ID NO: 11950 - DNA, 206 bp, Glycine max
  Clone ID: 701065120H1
gtcggttgtgagctataagctagtttatcgtgaggagaatatgaagttgtttgtcttcgttgttgctgcagtagttttggtagcatggccatgccatggcgcaggctaccaaaggttccctctccgaatgaaaactggctatggtgagcgttcttcggaggtaaaatgcgcaagttttaggcttgctgtggaagcacacaacataa

SEQ ID NO: 11951 - DNA, 262 bp, Glycine max
  Clone ID: 701065121H1
gatcgagataactagaaacagtgtgatgaaaatgaaggtccttgttttcttcgttgctacacttttcgtagcatggcaatgccatgcgctacgatatgttccctctccgaatgaacactggctatggtgcccgtactccggaggtgaaatgcgcaagttggaggcttgctgtggaagcacacaacatctttggctttgagaccattcctcaagagtgttgaagcaacaaaggaatacatccatggcgaacaatatagatcag

SEQ ID NO: 11952 - DNA, 142 bp, Glycine max
  Clone ID: 701065122H1
ctttcttctactatagctttttgtagtgaccaatatctcatctcacttctcatccttcacaccttcttcttcacatatccttcactaactaactctagtaaactgaaaacttctggtctctatttctattcccacacaacat

SEQ ID NO: 11953 - DNA, 261 bp, Glycine max
  Clone ID: 701065123H1
gaagagcatcactgaactaacaaagcaaccctatgtcgaaggtggtttgtctcaccggagccagcggcgccatcggaccatgggtggtcctactcctcctccagcgtggttacaccgtccatgccaccgtccaagctatcaaggatgaaaatgagacgaaacatttggaggaaatggaatgagcaaagagtcatctccatttttctgacatggatctcttgacatcgactccattgccgctgccataaagggttgttccgg

SEQ ID NO: 11954 - DNA, 262 bp, Glycine max
  Clone ID: 701065124H1
gtccctttctgttctcttcactcttggtcttgcgagagaaagccatgccagagacgaagatttttggcatgctgtttggccaaacactcccattccaagttcattgcgagctcttctaaagcctggccctgcaagtgttgaaatcgatgatcaccctatgcaaattgaagaaacacagtacccgaaaaccttcttctataaagaagaccttcataccgcaaaacaatgaaagtacaattcagcaagcctccctttcaacaac

SEQ ID NO: 11955 - DNA, 259 bp, Glycine max
  Clone ID: 701065125H1
tgccagccagcgattgccgccatttgcttctcctccgaacgatccaacaattcaacggccctgtgtttgttaattgagcttttagattcaacgctttaacattgggattttcagggtacaatggcttccaacatctcaccttctgcctttgataaagagcagatatttggactggctgaaaaggagatggagtatcgggttgaattattcaacaagagacccagacatgtttcaataagtgtgttgacaataggtacaa

SEQ ID NO: 11956 - DNA, 257 bp, Glycine max
  Clone ID: 701065127H1
cgacttacaagcgcaggcttgtaggtcgcaacaaacacggccgcggtcacgtcaagttcattcgatgctccaactgcggcaaatgctgccctaaggacaaggctatcaagaggtttctggtgaggaacattgttgaacaggctgcagtcagagatgtgcaggaggcttgtgtctacgaacaatacacgcttccgaagctgtatgtgaagatgcagattgtgtttcctgtgctatccactctcatgttgtgagggttc

SEQ ID NO: 11957 - DNA, 259 bp, Glycine max
  Clone ID: 701065129H1
gttgtttgcctggtggatgacacgccaataagggtgcacacgaacctggaacacaagggcattcccttcccgaaggaccaagccatgggcgtgtacagctctatctggaacgcggacgattgggccacgcagggtggtcgtgtgaagacatattggagccacgcacccttcgttgccacctacaaggacttccaaatcgacgcgtgcgcgtgcccgtgccggtgacgtcagcagattagtgctaagcactgtagcagca

SEQ ID NO: 11958 - DNA, 254 bp, Glycine max
  Clone ID: 701065131H1
aagataaactttacttcattgattatgaatatgcatcgtacaactacagaggctatgatataggagaccactttgcagaatatgctggctttgaatgtgactacgacttgtacccaaatatgaatgaacaatatcatttcctcaggcattacttgaaacctgacagaccccaagaggtgtctgagaaagatcttgaaactttgtatgttgaggcaaatacattcccttgcttctcacatttctgggcatgtggg

SEQ ID NO: 11959 - DNA, 168 bp, Glycine max
  Clone ID: 701065132H1
cacaaatcaaagccatggccacctccaacttctctattgttctctccgtctccctagccttctttttggtgctacttaccaaggcacactcgaccgataccgtttctttcaccttcaacaagttcaacccagtccaaccaaacattatgccccaaaaagatgctagta

SEQ ID NO: 11960 - DNA, 266 bp, Glycine max
  Clone ID: 701065134H1
acacatggcttccttaagctccttagtgctgctccttgcagctctaattctatcccctcaagttcttgcaaactatgagaatcccccagtgtacaagcctcccactgagaaaccaccagtttataagcccccagttgagaagcctcctgtttacaaacctccagttgagaagcctccagtttataagcctccagtagagaagccaccagtgtacaagcccccttgagaaacctccagtgtacaagccgccagttgaaaagccacca

SEQ ID NO: 11961 - DNA, 262 bp, Glycine max
  Clone ID: 701065135H1
tcgccattggaggcaacatcactctcatcactggtttcttatactggattgcccaattgttgggttctatagtcgcaagcctcctcctcaatttgatcaccgctaagagcattccaagccactcgccggctaatggtgtgaacgatttgcaagctgtagtgtttgagattgttatcacatttgggttggtttacactgtgtatgcaactgcagtagacaaagaaggggtcattgggtatcattgcacccattgctattgggt

SEQ ID NO: 11962 - DNA, 259 bp, Glycine max
  Clone ID: 701065138H1
tacgctattccgattaatcaatcatagatagatccattattcatagttaaacataataactgttgtgttacatctcgtgaattgttacaactgcttaaccattttctattgcagatggcttcgtcggttctctccgcagcttcgcactctgtctcaccctcatgttctctgtccaccacgcacaagggacagcccatgattagagacaacactttggattccacagaggacccaattcaatctctagttcaaggtctag

SEQ ID NO: 11963 - DNA, 256 bp, Glycine max
  Clone ID: 701065139H1
gacaaatttaagatatcttgctgaactcccacaaaatgttgatttggtgactttagacctctcattcatctctattctcttggtgatgcctgccgtggtcaatgccatgaaggaaaatgcagcattagtgactttggttaaaccacaatttgaagctcgtagatctcaagtaggaaaaggaggaatagtgaaagatcctgctgttcatcaagagccttgagaagattataaagggagtagagaattttggtttctg

SEQ ID NO: 11964 - DNA, 256 bp, Glycine max
  Clone ID: 701065140H1
gtcctaactcttttgtttctcatttcgttgagtcgaaacagcagctcctccgccgttggtccatcgccgcctcctcctcgtgccaccgcccttgggtgacgacggaaaagacgcagaattggtcctccgtggaatagtctccgtttccccgttttggaataatttccatcacttctcgttgcttttgttttgttcgaggttgggaggagaaaaaagcaagttgtaggaatggtggtttccaataagatgcagaaat

SEQ ID NO: 11965 - DNA, 258 bp, Glycine max
  Clone ID: 701065141H1
ctcgagcgttacgttgtttctgtagatggagaagggtagaaccgtggtggtgtctgcttcgcagtttgcatgcaccgatgatgtctcaactaatatcgccaccgccgagaggctaattagagctgcacataaacagggtgcgaacatcattctgattcaggagctctttgaaggttattacttctgtcaggcacaaagagtggatttctttcaagagctaagccacataaggaccatcccacaatcctcagaatgcag

SEQ ID NO: 11966 - DNA, 193 bp, Glycine max
  Clone ID: 701065142H1
tataagctagtttatcgtgaggagaatatgaagttgtctgtcttctctgttgctgcagtagttctcgtagcatggccatgccatggcgcaggctaccaaaggttccctctccgaatgatcaactggctatggtgagcgttcttcggaggtaaaatgcgcaagttctaggcttgctgtggaagcacacaacata

SEQ ID NO: 11967 - DNA, 257 bp, Glycine max
  Clone ID: 701065143H1
cttccgccgaggaacacaaacaacaacctcaacttaacgcattgcgtgcatgatggaggagatgaaagtttctcggcgggtggagtggtggcagaacatgatgttccccgttcggagggtttggtttgtcgttgccaagcgcctcggcattcgcaaaactgggttactgaagctaagtaatgatgtgagggcatgcgaatatgaggacattcatgatgtgggagatactaaacagaaacgaatcagagtttggtcgt

SEQ ID NO: 11968 - DNA, 258 bp, Glycine max
  Clone ID: 701065145H1
gcttcggctagggttcagaaacgaaaaagggttcggtgttctgttcgcgatgagagccaagtggaagaagaagcgtatgaggaggttgaagaggaagcgccgaaagatgagacagagatccaagtagtgcgttaaacctagtttgtttctgttgcttttacaattgcttatgttgtcgaatgggacacccagttgttagtggcactggtttctctttttgatgtttgatacattttgttggattcaagtagtttatgt

SEQ ID NO: 11969 - DNA, 262 bp, Glycine max
  Clone ID: 701065146H1
gataacacaacaacactctctcttctcgctcttggcttttcgctcttcactcactctcattcattcatttccaccgttcatggatcccctaaacgtgtggggtaacacgcccttggcgacggtggatcccgagatccatgacctcatcgagaaggagaagcgccgtcaatgccgcggaatcgagctcatcgcctccgagaacttcacctccttcgccgtatcgaggtcctcggcagcgctctcacgaacaaatactccgagg

SEQ ID NO: 11970 - DNA, 220 bp, Glycine max
  Clone ID: 701065147H1
gctgtgttaattttccataaaatttgtctgagtgaatgttgaaatgaacgtgcagtctccttgttttcactgccctccagactattcactcttttttcattttctgagcattcacattgaagcctgacagaaatcgagactgtggtcttttattatatccttataaatcttttcttatgtgtatgatttgtttagtaatttgtccaatctaatacacaga

SEQ ID NO: 11971 - DNA, 202 bp, Glycine max
  Clone ID: 701065148H1
ctttggcacacaacactagctacagtaagctacacttatttgaggttggagaaatatggctaaagatgttgaggttcaagagcaaggaggagagtactctgcaaaagactaccatgaccctcctccagcacccttgttcgacccagaggagctcacacagtggtccttttatagagccctaatcgctgagttcatagcaacc

SEQ ID NO: 11972 - DNA, 267 bp, Glycine max
  Clone ID: 701065149H1
gtgaaacatctatcttcctgtctaagttctttgaataaaagtctgaatgtgtcatctctatgctacaatgtttatgattcagatcaggttgattctatttgtttgatggccatcttgcacgtcctgatcttattgtgttcaagtgacggacaaatccaaacaggaaagagagatttgaaatgtaaatgccaagtaaatgtgaaaagtacagtccatttttatgatctctttaatttatttgttcatagattaatatggtcgtgtatg

SEQ ID NO: 11973 - DNA, 257 bp, Glycine max
  Clone ID: 701065151H1
gttaattctcaaggatccacatcttatcactccaaatgcactttcatacaaatcagcaatgagagagaatctgttgaggcagggatacagaattgttggaatcattggagaccaatggagcgatctgcttggagaccacagaggcgaaagcaggacctttaagcttcctaatcccatgtactacattgagtagtaccttcacctctctcaacaatctgctagagtttgctcctatctatatgtaatcgcgtatgctg

SEQ ID NO: 11974 - DNA, 257 bp, Glycine max
  Clone ID: 701065154H1
acacattataactcctgtttctttattaattctctctttcaaatatatggcagaagatgcttcaattattccaacacacacaaaagcctggtactactctgaacatggtagtccaggtgatgttctcaaattagatcctaattgagccttaccccaacaactcaaagatgaccaagtgctcatcaaggtcatcgctgcatccattaatcccgttattacaagaggatgcacggcgagttcaaggacactgaccctca

SEQ ID NO: 11975 - DNA, 65 bp, Glycine max
  Clone ID: 701065155H1
ggctcctgttctcactcagcatcgccgtaaccgttaggtcgagcgactgcgactacgatggtgtg

SEQ ID NO: 11976 - DNA, 232 bp, Glycine max
  Clone ID: 701065156H1
ccagactgagaggaagagagagggagattctttgtttgctaccttctctcggaaaaatggttacgttcaggtttcaccagtaccaggtggttgggagggctcttcccacggaagcagatcagcaccccaagatctaccgaatgaagctctgggccaccaacgaggttcgcgccatctccaagttctggtattttctgaggaaactgaaaaaggtagaagagcaatggccaag

SEQ ID NO: 11977 - DNA, 257 bp, Glycine max
  Clone ID: 701065157H1
ctttagccggcacaaacacgagtccattcccagcaccgaaatccgccgtggggttgtacctcagcagcagctccgccggcacgccggcttcggccgcaacccgctgcaagctgtcaccgacccgaagcgggtacgtcatgaacagcccataatccttggacacgtgtcggtttccgcagaacagttaacggtgacgttgatgttcacgttgtcggtatctgattcggcgggtaactgttgaccctgccaacccaatc

SEQ ID NO: 11978 - DNA, 255 bp, Glycine max
  Clone ID: 701065158H1
cctcgagcgattcggtcgacgacaatggcccccaaatgagcacgaagagaaagttcgacgctgatggagtgttcttcgctgaactgaacgaggttctgacaagggagttagccgaggacggatactccggcgtggaagttagggttacgccgatgcgcaccgaaatcatcatcagagccaccagaacccaagccgttctcggtgagaaggaaggagaatcagggaacttacctcggtggttcagaagaggttcaa

SEQ ID NO: 11979 - DNA, 256 bp, Glycine max
  Clone ID: 701065160H1
gcagcagcagagagtgcggtaggctcatccgagaccggaagcagcaatggggatcgatctcaaggccggaggtaaaagcaaaaaaaccaaaagaacagcacccaagtccaatgatatctatcttaagctcttggtcaagctttatcgcttccttgttcggagaactggcagcaaattcaatgccgttatactcaagagattgttcatgagcagttaacaagcccccattgtctttgtcaaggttgattaagtatac

SEQ ID NO: 11980 - DNA, 245 bp, Glycine max
  Clone ID: 701065163H1
cgatgatagataggcctcagaagcagaacaacaatggccactgccactgtttcaatttcaacactatgcgctaccttcggaacccattgcgccatttcccacgaccctaaacctcttttttctcaacctttcagtctcactcgctttccttctacctcttacaagctcactttatcgcctcgctcacctatttcaacccttcctaaggtctctgaatccggttgccgaaaaccgaaccggttcgt

SEQ ID NO: 11981 - DNA, 169 bp, Glycine max
  Clone ID: 701065164H1
gagataatggctgtggcgtcgtcatcatcccttatcacgttgaaggtgaaaccatgcattttcgggtctcctcggagatccgcggtggttcggaattgtgcgaagtcaacggcggggacaatatcgacgagttggagcctggacagctggagggcgaagaaggcgtttc

SEQ ID NO: 11982 - DNA, 262 bp, Glycine max
  Clone ID: 701065165H1
aatcccttcttctctataatatctatgatccattcactctgagccgtaacagttctaaactccaccatttagtgacacccttaacatgatataatgccatcggtgcattcaagcccgggttactcgatggaaaacccggctttggcgtcgctactccgtcacacgacaggggaaaacaagcgtagaataaattgtcgagcggaggatggcttttgaccttagcagctgtttcctatgttgagttcgggatgcaaaatggtgg

SEQ ID NO: 11983 - DNA, 260 bp, Glycine max
  Clone ID: 701065166H1
tacaaattctctgtgttgtgttttgtacttgtgttcattgtgttgttgttgtaggacatttaagtgaagagagcatgatgatgaagtctgctatgtgtgcattggtgcttgtcgcgatggttgtggttgaagtggggcccattgctgaggctgcggtgacttgtaacccaacacagttgactccttgtcttccggcaattaattcaggttctgcacttcgagtgctcgttgccagaagctgaatgagcaaaagccatgct

SEQ ID NO: 11984 - DNA, 260 bp, Glycine max
  Clone ID: 701065167H1
ttggagacgaagctctaaagccgattctccttttgaactggttgcctcactcactggccacactacagcagtggcccgtctggcggttggatgcaagatgctgtactccgggtccatggaccagagcataaaggtctgggacatggatacattacagtgtacaatgacactaaatgatcatactgacgtagtcacatcccatatctgttgggatcatatctgttgtcaagttcatctgaccgcactttttaggtctcggc

SEQ ID NO: 11985 - DNA, 256 bp, Glycine max
  Clone ID: 701065169H1
ttgaggatgccgaagaataatggaaatggaggtaagaacaggaataggggaaagaacgaggcggacgacgagaagcgagagctggtgttcaaggaggacgggcaggagtacgcgcatgtgctccggatgcttggtaacgggcggtgcgaggcgatgtgcatcgacgggacgaagaggctctgccacatccgcgggaatatgcacaagaaggttggatcgccgccggggacatcatcctggttggactcagggacta

SEQ ID NO: 11986 - DNA, 257 bp, Glycine max
  Clone ID: 701065171H1
agcaccaacagcatcggcggcgacagtcactctccgacaacaacacttccgcggcgaaaaatgtctctggtggcgaacgaggatttccagcacattctgcgtgtgctgaacaccaacgtggatgggaagcagaagataatgttcgctatgacctccatcaagggtattggaaggagattcgccaacatcgcttgcaagaaggccgatgttgcatgaacaaaagggctggtgagttgagtgctgcagagttggatagt

SEQ ID NO: 11987 - DNA, 256 bp, Glycine max
  Clone ID: 701065172H1
gagtgatttcagtgagtgatcggtgttcacttgatctcatcataatcgtcagcgtcaattgaagaagatgccgatcagaaacatcgccgtcggaaggcctgaagaggcgactcaccccgacacgttgaaggcggctttggctgagttcatctcaaccttcatcttcgtgttcgccggctcaggctccggcatcgcctacaacaagctcacgacaacggcgctgccacccctgccggcctcatctccgcctccatcg

SEQ ID NO: 11988 - DNA, 255 bp, Glycine max
  Clone ID: 701065173H1
cagcaacagcagattattcttctttgtctctgttctttcttcatcagccgattcagctttgtccatggccaccgaaccaaaagcagccgccgatgacgtcaagatcgatctcttcgaagacgacgacgagttcgaagagttcgaaatcaatgaagagtgggatgacaaggaagaagggaaggaagtgactcaacagtgggaggatgattggatgatgatgatgttagtgatgatttttctctccagttgagaagg

SEQ ID NO: 11989 - DNA, 255 bp, Glycine max
  Clone ID: 701065174H1
ctgtgttgagttttccaaccttaaaaagactctctcttctctctcgctctttctctccctgaagcaaaacaacattagcatcaaaaccagagtggttctagtaatccggtgctgctagaggatgggaactagtgaatggcatatcgagcgaagatctagcttcggcactgaatcccccttagcaatataggcacgcaatgtgcctgaaactcgtcactctctattgtcgtgcttggcgcttctggggatcttgct

SEQ ID NO: 11990 - DNA, 251 bp, Glycine max
  Clone ID: 701065175H1
gtcgctccgcaccagtttcaccgcacgaatatcttgttgtttggagcgatccgagaaaaactctgtaaacatgttggtttaccaggacctccttagaggtgatgagcttctctctgactccttccgttacaaggaaattgagaatggaatgctgtgggaagttgaggggaagtgggttgttaaaggagcagttgatgtagacattggtgaacccttctgctgagggtggaggagaagatgagggagttgat

SEQ ID NO: 11991 - DNA, 164 bp, Glycine max
  Clone ID: 701065176H1
atgtgaaactttcatcatacttgtactcttcccacaggctataataaccagtgttctttctctctctgaactgcaccacactctcgcataatctaacgtatcaccttcttcccaatgtcaccgtgtctttgagacgcctcgctctgttccctcttccacgcgtc

SEQ ID NO: 11992 - DNA, 255 bp, Glycine max
  Clone ID: 701065177H1
catttgatgggttacaaaaattgcaggctgctaggaaaacagcagagaatgctataaaccttaaacgagtggatgaccaggttaacaaagcagtaatagctgcgagcaaggctgccactgctgctagagttgctgctgtgaaagctgttcagaacaggatggatggaaaattttgcgacactgatgtctaagaattagatgttagcttttgttggaattgtaattgtaaattttttttttactaatattgagtcc

SEQ ID NO: 11993 - DNA, 255 bp, Glycine max
  Clone ID: 701065178H1
cttgtatttctctccttaaaacccgacctcgacgtttgcctcgctcagtctcagtctcagtttcagtttcggatccctttcttctctcacaccaatttccaggatttgaaacatggcagattcaaaatcaggattgaggaaaccagtgttcatcaaggttgatcagcttcgcccggggacaagtgggcacactttaactgtgaaggtagtcaactaagatggtgatgcagagaggtcgttctgatggtcctcaat

SEQ ID NO: 11994 - DNA, 110 bp, Glycine max
  Clone ID: 701065179H1
tacacatctctcgaagctttcaatgttcgttctcagtgttattcgaatccctctctcaatctcctttccaaatggccagcgttgaggttgacaggaaacagcaacaacag

SEQ ID NO: 11995 - DNA, 254 bp, Glycine max
  Clone ID: 701065180H1
caaaaggtaaaggaggaaaggcagagtgagttatgctggtggaagcgatgatgatctattgaagagtattaacgtcacagcgttggctattttggccatgttttcatggttgtgctttaaacaatttgagaattttgtatgtaatggtataaatttttacctacatcaaacttaaacaatgaattctaagataaaaaacaaaaaaaaaaaaaaaaaaagacaaaaaaaaaaaaaccaataaaagaagacaagat

SEQ ID NO: 11996 - DNA, 265 bp, Glycine max
  Clone ID: 701065181H1
gtcttcttaatttcctcactcgcaagtcacaccaatggcaaagctattcaatttcctccctctcctcttcctcaacatcttcattcagacaatttcagcccaagtagcaccagcaccagcgggccccaccaacatcacccaagttcttgagaaagcaggccaattcacaaccttcatcaaacttctcaaggcctcacaaatagctgatagaatcaattcagctcaacaactcaaaccaaggcctaaccgtatttgcacccactga

SEQ ID NO: 11997 - DNA, 69 bp, Glycine max
  Clone ID: 701065182H1
gcagatccgaggagttaccccttagcttgttctctttccttattctatttcagacttccaccggtgatg

SEQ ID NO: 11998 - DNA, 255 bp, Glycine max
  Clone ID: 701065185H1
attactagaaagttagaaaacatggcagcggtggccggagcatcctcgtccgtgattaaggtggctgcactttccggatctttaaggaaaggctcttacaacagagccctcattcgttctgctattgagctaagccaaggtagagttgaaggccttcaaatcgagtacgttgatatttcgcctttgccccttctcaacaccgatcttgagtgactgggacctaccccccacaagttgaagcctttcgccagaaga

SEQ ID NO: 11999 - DNA, 255 bp, Glycine max
  Clone ID: 701065186H1
ggcgtttggtgatctccgacgggaatccattcctgtttaagcttcagaaagttggttcatcttcttctgcatgaagcacctccgtgtagtttctcctagtgagagacgtgtgcaagatgatgcttgataaataaatgatttggttgtaactaccgaaggattagataaaactaatcaaagcttatatatgctacgttttcggttgcttacaaaaaaaaaaaaaaaaaaaaaaagaaaaaaaaacaaaaagggggg

SEQ ID NO: 12000 - DNA, 254 bp, Glycine max
  Clone ID: 701065187H1
caccgatgttgctgtcctcttggacaatgaagccatttatgacatctgcagacgctctctcgacattgagcgtcccacctacaccaacctcaaccgccttgtttctcaggtgatttcatctttgactgcttccttgaggtttgatggtgccctgaatgtggatgtgactgaattccagaccaacttggtcccataccctagaatccattcatgctttcctcctatgcaccagttatctctgctgagaaggccta

SEQ ID NO: 12001 - DNA, 255 bp, Glycine max
  Clone ID: 701065189H1
gtcgtgtagccttccctaaagtatctggtgctttggttgggaataacgaaacgatgggagctgaaactgaatcatcacaggaaaaacccgaacaagagaggccgaagcctactctctcacaggaacagtttctctcatggaagcgccacaaggacgctgcagtatcagccagaaaagccgaagtatccagtaagcgtgcagaagatattctgcaggaactgtccaaatgaatggccgggagctatttttacatga

SEQ ID NO: 12002 - DNA, 254 bp, Glycine max
  Clone ID: 701065190H1
gtcagatcatatatcacaagggcattgtagcaacagctctggattaagtacaccagagaaccgtactctcgaagatgatgaggatatattctcaaaaatggaatcttccagaatctgcaggaaatatcagatggggttatcgtgctctgatgctgaggttgactacaggagaggaagaagcttccgagaagaaaagggaatgtgatttaaactagaattaatcagttgagaacagattgtctgttatctgtgta

SEQ ID NO: 12003 - DNA, 241 bp, Glycine max
  Clone ID: 701065191H1
caagaacaatttgagtagataccctaagtcctctgcgttttggctgaaaaaattccttctcaagtgatctaaatctattgttcctttggcatgcatgcccagtttttcttcttgtttgtttcctggatatcacagacatgcagtgtgtatcacttgctcttcgattcggatcaatgtaatcaagtcatcgttgatatcaaataaataaggcatgccagagaatggaataaattatcttttc

SEQ ID NO: 12004 - DNA, 71 bp, Glycine max
  Clone ID: 701065192H1
cgataatgtgaattatcttgtgtatcccaatccaacttaatgttacttgctttttacaaaaaaaaagaaaa

SEQ ID NO: 12005 - DNA, 243 bp, Glycine max
  Clone ID: 701065193H1
gtgcacacacactctcactcaacgctttctgggtttgcactcactcactcatctctttctctctctctcatcaatggaacccgcgaaaattgattggaagaggctagagtggagcttcgtggaagacaagctctacgagcacatcaacgcgcccaagtgggttgacttcttgtcccttgaccactccctcaatgatcatgctgacgaagcggttctgcaagcctgattgcaaacatcccagga

SEQ ID NO: 12006 - DNA, 127 bp, Glycine max
  Clone ID: 701065195H1
tgggaatggtggtggtagtgccaggtgtctgtctgaggagaaaatagaataaaaagctatgaaattttggcacaaggtctgattgtagaattgaagaagatgactggggggggtatcactatgcaat

SEQ ID NO: 12007 - DNA, 211 bp, Glycine max
  Clone ID: 701065201H1
agagtttgttgtgagctataagctagtttatcgtgaggagaatatgaagttgtttgttctctttgttgctgcagtagttttggtagcatggccatgccatggcgcaggctaccaaaggttccctctccgaatgacaactggctatggtgagcgttcttcggaggtaaaatgcgcaagttttaggcttgctgtggaagcacacaacatccga

SEQ ID NO: 12008 - DNA, 271 bp, Glycine max
  Clone ID: 701065202H1
cttgttccctcgttaaccctaatcatcaactcaagcagtgaacgaatctgtggacggacgagaactcctcggtgatggaggccttcatgtcgtcctccgatctctcctcaatctggccctcgccggccccgcgcaatccacggcggtcttcaatcaggacaccctccagcatcgcctgcaggccttgatcgaaggcgcccgagagacctggacctacgccatcttctggcagtcctcttatgactattctggctccactctcctcggctgg

SEQ ID NO: 12009 - DNA, 270 bp, Glycine max
  Clone ID: 701065203H1
gagataactagaaacagtgtgatgaaaatgaaggtccttgttttcttcgttgctacaattttcgtagcatggcaatgccatgcgtacgatatgttccctctccgaatgaacactggctatggtgcccgtactccggaggtgaaatgcgcaagttggaggcttgctgtggcagcacacaacatctttggctttgagaccattcctgaagagtgcgttgaagcaacaaaggaatacatccatggcgaacaatatagatcagactccaaaaca

SEQ ID NO: 12010 - DNA, 267 bp, Glycine max
  Clone ID: 701065205H1
gggaatcttcttccatggcctccaagcggattctgaaggagcttaaggacctccagaaagaccctccaacctcttgcagcgccggtcctgtagcggaagatatgtttcattggcaagcgactataatgggtccccctgatcgcccttatgctgggggtgtttttctagttactattcattttcctccggattatccattcaagccacccaaggttgcatttaggactaaagttttccacccaaatatcaacagcaatggtagtattt

SEQ ID NO: 12011 - DNA, 266 bp, Glycine max
  Clone ID: 701065206H1
caggaacccaaactcttccgaatggatattagttcaaacataagatatggatgtacgcgagatgtaaagcaggaggatattgaatgggctgcaaagcaggcctatgcccacaactttatctcagcacttcccaatggttatgaaacacttgttgatgatgatctgttaagtggaggacaaaagcagcgaattgctattgctagggcccttcttagggacccaaaaatattgatccttgatgaagccactagtgcactagatgctga

SEQ ID NO: 12012 - DNA, 168 bp, Glycine max
  Clone ID: 701065207H1
tctgttcaaatggcttatgcagtctcagagacagatgctgcgaaggctccacgagcaccggacggagtggaatcatacataacggagatgttccttaggggaaagaaatattacctctatgtacacagttacttgcgatacggtatgctagcagctcgtgcagaggct

SEQ ID NO: 12013 - DNA, 264 bp, Glycine max
  Clone ID: 701065208H1
cccatctcttgtttcttgctttctttcttcaccatgtcacttgctgggaaaatcaccactgaaatcggggttcatgcaaccgctacaaagtggttcaacctcttcgcaacacaactccatcatgttcaaaacctaactgatagagtgcatggaaccaagctgcatcaaggtgaagactggcatcacaacgagacagtcaagcactggacttataccatagatggtaaggttacaacatgtctggagagtattgaatccattgat

SEQ ID NO: 12014 - DNA, 264 bp, Glycine max
  Clone ID: 701065209H1
acaataataagttaataactcgcgtagccaaggcacagcataaacgacgctgcgctgaacaacgccggtgtcagacaaacggtgccggttggtggggccgccacgctattacgcctaatcgtatccatcaccctcatcaaaacccctcctttctcttaatttagaaaccctaattcagaagataaaagttactttctccagaattagcgcgtaaggctaatggcatcttcagactcatggatgaaggaatatcatgaagctgtg

SEQ ID NO: 12015 - DNA, 264 bp, Glycine max
  Clone ID: 701065210H1
gcgctccacccgaagtggtggcgcgtatggctgcggctaagcaagagtttgaggcacggcaaagatcttcagttggttcaagggaaacttcaaaagaccctgaacttgaccaattcatggaagcatactatgacatgcttgtgaagtatagagaggaattaacaaggcctattcaagaggctatggatttcatgcgaaggatagaaactcagctaaatatcgcttccagtggacccgtgcggatcttctcggatgataaatgtg

SEQ ID NO: 12016 - DNA, 68 bp, Glycine max
  Clone ID: 701065211H1
ctggaatcctaataccatgaataatatttaatattcaaagcaccaagagccaaacgcccggacacaaa

SEQ ID NO: 12017 - DNA, 268 bp, Glycine max
  Clone ID: 701065212H1
cccaatagcacgtaggcattcacttcaaaggtttcttgagaagcgtcgtgataggcttgggagcaagacaccttatccttcctcatcaactacaaaactggctgacaacatagagaacaacttctgtgctgacaatgcaccagaactgatttccttgaatcgatccgaggaggaatttcagccaactgtctctgcctcttgagcgtaaccagtgtttgctctattctatgttgtgtgatagagtggaagaccatgagtgtgcttgtag

SEQ ID NO: 12018 - DNA, 274 bp, Glycine max
  Clone ID: 701065213H1
ccacaccttcaatatatggaagaagcactttctccttctatctcccacctactttatctcctccttctttacctatgaaccaattaaacaacacacttcatcacaaaactttctttattccatttcttcaaacttagtttatatatatatattaatctatttctcttgtgtcatgggggctggtgtttcttcatgtaataaagttgaaaaagaaggaggagggtctatttcttcatcatcaagagattcaagacccggtcttggtgacatccca

SEQ ID NO: 12019 - DNA, 263 bp, Glycine max
  Clone ID: 701065214H1
taggaactctaagtctccctcccccctctctctttctctcgctctctctctcactatatcaatattaatatgaacctctctcaattcaattccagatagactttgttggcatttgagttttgttgaattgaaccaaaaaaaaaaatgggaaggcaaccttgctgtgacaaagtggggttgaagaaggggccatggactgcagaggaggataagaaactcatcaatttcatcctcactaatggtcaatcttgctggagagctct

SEQ ID NO: 12020 - DNA, 228 bp, Glycine max
  Clone ID: 701065215H1
ctatctcggagttgagttgagaaggaaaggctgaagaacacatagagagagagagagaagtgcagaaaaaatgagactgttcgatccatggcctgttttcttcaagagagaatggaagcggaattggcccttcttggttggattcgccatcaccggaactctcatcaccaaactttcccttggtctctctgaggaggaagccaaacagtcgaaattcgtcaaggcaca

SEQ ID NO: 12021 - DNA, 279 bp, Glycine max
  Clone ID: 701065216H1
gttcgttccacgttgttgttcgctctgtgtctctcactctctctatatttgcatcattcatcggaaatggctctcgaggttgctgttaaggctgctgttggggctccaaatgttctcggagattgtccattttcccaaagggtcctcttaacttttgaggagaagaaaatcccctaaaaaattcacctcatcgatctcagtaaaaaacccgaatggtttttgggtgtgaatcctgaagggcaggtgccagtgggtctttttgatggcaaatgggtggct

SEQ ID NO: 12022 - DNA, 269 bp, Glycine max
  Clone ID: 701065217H1
gctcaaccttctgtgccttcttcctcctgtgtgcaatcttggccgtccacgtggcacaatcctcatcctccaccctcgacctggacgccttcttcctccctctcaagtccggctgtcgcggatccgtcgccgagtgcagcctcctcgccggcgacgacgcgagtttctgatggagtcggagagcaaccggcgcattctagcagcaaggagctacataagctacggtgcgctgaggaggaacactgtcccttgctcccgacgtggtgctt

SEQ ID NO: 12023 - DNA, 262 bp, Glycine max
  Clone ID: 701065218H1
aggaaatggaagtgagtggaaggagctgtggcgttttgggcctcccttattgtgtacctgtgagaaaaaatggaaggaggtttgtgacaactttggctaaaaggaatgagtctcaagagaagagtaagggaccctctttcacactgagggtttccaagtcaactatcgctcgtggtgccattggactgtttggattggggttcgtcgatgccgggtacagcggagactggtcgaggatcggagtgataacaccgcagactga

SEQ ID NO: 12024 - DNA, 75 bp, Glycine max
  Clone ID: 701065219H1
ggctaaaacctcgatgaaatcgacggacaactcgtcctctctatcgaaaaggtgcaggagatccaagacgagctc

SEQ ID NO: 12025 - DNA, 266 bp, Glycine max
  Clone ID: 701065220H1
ggcggtgtggaagctgtggccacaatacaggcaattaggacagggtgggttcatcccaatatcaacctagaaaacccagataacggagtggatgctaaagtgcttgttggctcaaagaaagagagactggatgtcaaggcagccttgtcgaattcatttggttttgggggtcacaattcttcaatcatatttgcaccatactagtgaaacagatttcagagcagtactttcttattattataagttactgagtacccagacaatgt

SEQ ID NO: 12026 - DNA, 260 bp, Glycine max
  Clone ID: 701065221H1
gaaaactggctatggtgagcgttcttcggaggtaaaatgcgcaagttttaggcttgctgtggaagcacacaacatccgagcctttaaaaccattcctgaagagtgcgttgaaccaacaaaggactacattaatggcgaacaatttagatcagactctaaaacagttaaccaacaagctttcttttatgctagtgaacgcgaagtccatcacaacgacatctctatattcggcatagataacaccgtactctctaatatcc

SEQ ID NO: 12027 - DNA, 193 bp, Glycine max
  Clone ID: 701065222H1
tcattcgtctccagatcttccttccttgataacgttttcgggttcgagaaggcacttgtttgtttgtcgtacgaaatggagactaaaccgagttcggtgatggttacgctcagttacggcgcgttgacgtgcgccgcggaagttctcgcgcatttgctagcttctgctgtcgtcaaagccacgcttttggccc

SEQ ID NO: 12028 - DNA, 269 bp, Glycine max
  Clone ID: 701065223H1
gcatcacctccttttacactctcgaattcgcattctcttcactcattttccaatccatggccaagggagagaaaaaacctgcagagaagaagcccgcggcggagaaggctccggcggagaaaacaaaagccgagaagaagatcccgaaggacgcagcctccggcgagaagaagaagaagaggacgaagaagagcgtggagacgtacaagatctacatcttcaaggtgctgacgcaggttcaccctgacatcgggatctccagcaaggcc

SEQ ID NO: 12029 - DNA, 266 bp, Glycine max
  Clone ID: 701065224H1
cgaatatcaatcactccgattcctgttggttgttctctcaagtctcaactcccaccccccctctttgacttttctatcagaagagcttgttggagttgaaaactgagaagaaaacatggcagcacaagggcctgtggtagtagcatcacttctaattttctgtttagctggaagttgctatgggaaggttcacttctcttccttgaaaagaacccttgatgtcactgcttcccccaagcaggaacaagttctggaggctggattag

SEQ ID NO: 12030 - DNA, 264 bp, Glycine max
  Clone ID: 701065225H1
tgggacccgaatacgaatcgacgctgacacagatccctctgctggggacgaaggctggtccacgagacggggcggcatggacgcagaggctgaaggaagagtacaaggctctgatagcgtacacgcaaatgaacaagtccaacgacaacgattggttccgcatctccgccgccaatccggaaggcactcgctggaccggtaaatgctggtacgtctacaacctcctcaagtacgaattcgacctccaattcgatgtccccgtca

SEQ ID NO: 12031 - DNA, 191 bp, Glycine max
  Clone ID: 701065227H1
gcctctagggttatcatttctccatttccattttctctctcacttttcaagaatcgtaagctatgggaaagtcttacccaactgtgagtgctgattaccagaaggccgttgagaaggcgaagaagaagctcagaggcttcatcgctgagaagagatgcgctcctctaatgctccgtttggcatggcactct

SEQ ID NO: 12032 - DNA, 271 bp, Glycine max
  Clone ID: 701065230H1
gtcacttacagagcagaggaagaatggcagatggatcatcaacaccagcaacaccttctgccaaagtttcagccatcttcatataccctattaaatcatgccgtgcaatttctgtttctcgtgctcctctcactcctactggatttcgatgggatagacaatggatggtggtgaattcccaagggaggatgtacactcaaagagttgaaccaaggcttgccttggttgaggttgaattgccatctgaggcatttcttgaaaactgggaact

SEQ ID NO: 12033 - DNA, 275 bp, Glycine max
  Clone ID: 701065231H1
ctacaactagtaacaaagatccaacaagcagatcaatctctctctctgtctcccaatcaaaacagacatgggtttgaaggaggattttgagcagtatgctgagaaagcaaagactttgccaccgactcaatcaaacgaagacttgcttatcctttatggattgtacaagcaggccaccgttggacctgtcaacaccagccgtccgggaatgttcaacatgagggacagagctaaatgggatgcatggaaggctgttgaagggaatccaaggccga

SEQ ID NO: 12034 - DNA, 201 bp, Glycine max
  Clone ID: 701065233H1
aatggcatcattcatcatgacagcttccatccttggcagcccagccgtcaccaaccggtcggcagtagcaacgcagaggagatcactcgtagtgaatgctgccaaagctgttgaagcagaaaaggtcagttatgacaatgacatggatggtagcaatggacggaggaacttgatgttcgccgcggcggcggctgctgtttg

SEQ ID NO: 12035 - DNA, 269 bp, Glycine max
  Clone ID: 701065234H1
gagagtggtttcagtgagtgatcggtgttcacttgatccttcataagtcgtcatcatcatcatcatcatcaccgttgattgaagaagatgccgatcagaaacatcgccatcggaaggcctgaagaggctactcaccccgacacgttgaaggcggggttggctgagttcatctccaccttgatcttcgtgttcgccggttcaggttccggcatcgcctacaacaagctcaccgacaacggcgccgccactcccgccggcctcatctccgc

SEQ ID NO: 12036 - DNA, 263 bp, Glycine max
  Clone ID: 701065237H1
aacactcttctctgcagcttttgcctacaactcccttcaccatggctgaacaaaccgagaaagcttttctgaagcaaccaaaagtgtttctcagcacaaagaagactgggaagggaaagagacctggaaaaggtgggaaccgcttttggaagtccattgggcttggatttaagactcccagggaagccatcgaaggaacctatattgacaagcagtgccccttcactggcaatgtttccatccgtggccgtatcttggctgga

SEQ ID NO: 12037 - DNA, 264 bp, Glycine max
  Clone ID: 701065238H1
tggtcagaggctaacttctccactagttttctgtgtagagagctctttggacaacaccctctaaaccaatctatcaagtcctgattaatctggtgagcatggagctttgttggctcacaaccatccatggttcttgaagaagcttggagagaaaggggtgtgagaggagagggtgctcactcctcacactccctcacttaaaacagtttgttttggcttagctttggcttctctgatcaacaagggatgtgttctaacattctt

SEQ ID NO: 12038 - DNA, 265 bp, Glycine max
  Clone ID: 701065240H1
gaaacagggattattattattgtagagctgagaactgaggacaatgtctgctgaatcgccaagttctgctcgtaaagtggttgttcatctcagagccaccggcgatgctcctattctcaagcaatccaaattcaagatagcaggaactgataaattcgctaaagtgatagactttcttcgccgacagctccacagggaaacattgtttgtatacatcaatagtgctttttcaccaaaccctgatgaattggtcattgatttgttt

SEQ ID NO: 12039 - DNA, 251 bp, Glycine max
  Clone ID: 701065241H1
agtcactgcttttctggcattcagtagtgtaaaccctggagcactactacttgaccttctgttatttggcaacaccttgccttctgacttggttgcacagactaccttccttgatgttgcacaagtcaagaaggttaaggctcgttttggtggcagaggctagggtttcttatgaatcaactcatacctagtgtttgtcttagtgataatcgtcagcaattaataaacttgtgcatttgggtgtgttttgc

SEQ ID NO: 12040 - DNA, 265 bp, Glycine max
  Clone ID: 701065242H1
gcttatactaactaactcttcttgagaaactctttctcacacgccaagagtaacatgggatttccagtggggtacacagagttgatgctgccgaaggtgtttctgcaggtgctatccgtattgggcttgataagaaaactcatcaccgtcctcttgtgctacatgggcttccacgatttcttcgaatccgacattgcgtggccggagagggcgccggaattccagtcggtgtgggcggtgctcataagggaaatcctaccggtgg

SEQ ID NO: 12041 - DNA, 261 bp, Glycine max
  Clone ID: 701065248H1
caacaaatggccgaaaagttagtgctggtatcagacatggcttccactatgaagcaggttcgctctaatttcatcaggccactcggtgaccgtccaaatcttcaaggcgtcgtccaatcctcagatgtttgcattcctctcatcgatctccaagaccttcatggccccaatcgctcccacatcatccaacagattgaccaagcttgccaaaattatggattttttcaggtgacaaatcatggatgtcccgagggtgtgatt

SEQ ID NO: 12042 - DNA, 248 bp, Glycine max
  Clone ID: 701065249H1
cttcttcgtctcaaacctcttcgttccttcgattcattccatctcttccaaaatggccaaagacccagttcgcgttctcgtcactggagccgcagggcaaattggatatgctcttgtccctatgattgctaggggagtgatgctgggtcctgaccagcccgtgatcctccacatgcttgacattgctccagcagcagagtccctgaatggggttaacatggaattggtggaggctggattcccccttc

SEQ ID NO: 12043 - DNA, 266 bp, Glycine max
  Clone ID: 701065251H1
caaaagaaaagaaaaacttcacttcacttgcatgccaaatgagaacaacctcttcttagaataatttcctcggtgtttaagccttgtcgatttccgaacaccaatccgagttaattaaacaatgagagtttcgacagaaaagttagagacagagccggagagcaaaaagataaaacgcattcgtggcggcggcggcggggactcgagcaataagcacccgttgtaccgcggcgtgcggatgcggaactgggggaaatgggtgtcgg

SEQ ID NO: 12044 - DNA, 260 bp, Glycine max
  Clone ID: 701065254H1
gaagaatgatgatgacctctggtgaagctgtcaagtacaagagttccttggacgcattcacacagatcctcaagaatgagggcgccaagtccttgttcaagggtgccggtgctaacatcctccgtgccgttgctggtgctggtgtgcttgctggttacgacaagttgcaggttcttgtgttcggcaagaagtatggttctggtggtgcttaatttcagtgctgagtcagtgtgattattattgttttttagatggcgctg

SEQ ID NO: 12045 - DNA, 264 bp, Glycine max
  Clone ID: 701065256H1
cttgcctttaccatctcagtctcaactctctccaacaaccacaatggccctcttgggcgccgcctcctcctccgctcgcatcattccctccgtctcactcccttcctcttctcgctccttcttctcactctcatcctcttcttccaaactccaatgcttgcgctcctctcctcgtatttcgcacctctttctcaatcagcgaagagcggaggttcgcgtttcgagtggaggatacggaactgtgtcggcaccgaagtcagttgc

SEQ ID NO: 12046 - DNA, 223 bp, Glycine max
  Clone ID: 701065257H1
agagaatccgtcaatggacggaagctctgacaaactgtcttctgaggatggtaaaacctcatcactgaacttgaaggagacagagctgaggcttggcctccctggttgcgagtctccagagagaaaatcaggttctgcactctgtctttttggcaaagagttgcagaacaataacaatgtttgctcagttgtaagccctttgaaggctggggccaagaggggc

SEQ ID NO: 12047 - DNA, 263 bp, Glycine max
  Clone ID: 701065258H1
cttttggacttgatggtccaaaggatgttgcgatgaaacttgactgtcagatccgaggatgaaactgttagcgataccatccatgagattgtggctagcggctagtgcactttgtcaagaaatgttggctcaactcggcctttctttttgttactgagattggagtttagcagcctcatagatagccgtgtgtaaaaagaattgcaaaactgtacacttagtatatgcaatttattggtcgcccattgcatgctttgttagac

SEQ ID NO: 12048 - DNA, 253 bp, Glycine max
  Clone ID: 701065259H1
tgaacttgtttgtctgtttccaatggagcaagggagcacagacactcgtgtggatgcaaacccaagtctttccagtcacgaagaaatacaatctttggatttcgatactgagtgtgagaccaaaatgaccaactctgctggaaatggggcaggaggttcttcctatgttgaagaaggcgtgagacaaaagcgcggcagaaaaagtaaaaaggagatgggaaagatgttagatgctaccgccatggacggtggg

SEQ ID NO: 12049 - DNA, 266 bp, Glycine max
  Clone ID: 701065260H1
aattgattgacatcaaacctcaccaccgctgctaggtcaagcttctctgtcggtcattgcatctccaatctcgcttcttctctcagattcagataccaattcggtttcttccgaaccaaacttgtttttgagaaattcggcaattgatgttccatggccaacaatccgtcaacagttttcccatccaaagttgattgaccgggggtataggttcgaaaatttgggtgataatgaagggtgacaaggagcttgttggtactcttaga

SEQ ID NO: 12050 - DNA, 270 bp, Glycine max
  Clone ID: 701065261H1
gttgatcgagataactagaaacagtgtgatgaaaatgaaggtccttgttctcttcgttgctaaaattttcgtagcatggcaatgccatgcgtacgatatgttccctctccgaatgaacactggctatggtgcccgtactccggaggtgaaatgcgcaagttggaggcttgctgtggaagcacaccacatctttggctttgaagaccattcctgcagagtgctttgaagcaacaaaggaatacatccatggcgaacaatatagatcagact

SEQ ID NO: 12051 - DNA, 262 bp, Glycine max
  Clone ID: 701065264H1
ggaatagcggtagagtgtgcgatcgagaaagcagccagcagaaagatggggttggaatcggtgggagatttagcgattaacgtgattctgaaaaaattaggagcccaagacattgcgagagtggcgtgtgtgagcaaaaggttcagttcttccgcttccgatgacactctttggatcaatctctgcttcaatgaactcgctttgacacaacccctcgatcatctcggaaaccctctctcttccttcaaggaatgctatctag

SEQ ID NO: 12052 - DNA, 148 bp, Glycine max
  Clone ID: 701065265H1
ctttcacttttgctttgagatggcaaagtcgaagaatcacacagcacacaatcagtctacaaggcccacaaaaacggcatcaagaaacccaagaggcatcggcacacttccaccaaagggatggatcccaagtttctgaggaatcaga

SEQ ID NO: 12053 - DNA, 264 bp, Glycine max
  Clone ID: 701065266H1
aatttatctgtggacactgcctatcagaccaacattgttgcttaattagtccatgcatcttgagcaccatgagaatgagattgtgtataaaataaattatcatgtgctgtgtgttgtgcaagtactaccttctctagctagattgctagagctagaatttcaacctacctatgtgtactgataagatctgcttccctacttaaagagagcatcatcctgtgatcagtgtgcttcgtattctctctctctatatatatatggtaa

SEQ ID NO: 12054 - DNA, 262 bp, Glycine max
  Clone ID: 701065269H1
cagcaacagctacctcctccattcttcatttccattaccaaaaagaagacaccagactctctataaccataaccatgttaatggcaacaacatcccctcacaccggcctcttccaaaaccgtaccaaaccttcttttcctttcactttggagaaatcagagctggagggtgagttatcaaggaggctgctaaggagaagatggtgcagctcaagggacataggtcagtgggaggtcatgagggcttctatttacaatgccat

SEQ ID NO: 12055 - DNA, 258 bp, Glycine max
  Clone ID: 701065270H1
caactatttacaaacactaactaattagtagtgtagttcttgatcaagtgatagctggtagaaaaatgatggagtgctgcaagattgctatagttctcaccatctacattatggctatgttggtttttgctcactgttgtgtggctgagaatgtagctgaagatgttgctgcaattccacccacaccaatggaaagtgcaggggtgcatctttgtgcctcagctgtttttgtagtcactgctttggtggttgcaatgt

SEQ ID NO: 12056 - DNA, 222 bp, Glycine max
  Clone ID: 701065271H1
agcaattgacacaactctatggtcgattgactggggcattgctgagcttgtgaaccacccagagatccagcaaaagttaagggatgagattgacagagttcttggagcagggcaacaagtgactgagccagacatccaaaagctcccatacctccaagcagtggtcaaggaaactcttcgtcttagaatggcaatccctctccttgtaccacacatgaacct

SEQ ID NO: 12057 - DNA, 263 bp, Glycine max
  Clone ID: 701065272H1
caaatttcaagcacaaaaaatggcggagaagaaagtggtgatcctaggaggtggtgttgccggtgccaaccttgcaaaaactatacaacgtcaagccaacgtcacccttattgatccgaaggaatattttgagattccatgggcaagtttgaggggattggttgagccaacttttgctgaaaggatagtgatcaaccatagagagtacttcaaaaagggtaaccttgttgtatccagtgctgtcaacataactgaaactgcag

SEQ ID NO: 12058 - DNA, 263 bp, Glycine max
  Clone ID: 701065273H1
atgccatcaagtcctgggtgcatgaatatgtctcattctactacaagtcagatgcagcaattcaacaagatcccgagctccaagcttggtggaaagaacttgtccaagtgggtcatggtgatttgaaagataagccatggtggcaaaagatgcaaactcgtgaagagttgattgaagcctcggctaccctcgtatggatcgcttcagcccttcatgcagctgttaactttggacagtatccatatggaggtttaatcctaaac

SEQ ID NO: 12059 - DNA, 261 bp, Glycine max
  Clone ID: 701065274H1
ggagacgacggcgaacgaaacgctgtcgttgcgccaatcgcggcgttgttgttggtggtgctactcgcggcgagtgtggtggtggaggctcaggagaactcggacgtgaagacgctggtgaagcacatgcacgggaagaagtactgcgacaaaggatgggaatgtaagggctggtcaatttactgttgtaacctcactattactgattatctccagacctaccagttcgagaatctcttctccaagcggaactcgccggtg

SEQ ID NO: 12060 - DNA, 221 bp, Glycine max
  Clone ID: 701065275H1
tgatcatcacaattctaattcattcaccaaaaagttcttcgccccttctttgtccccattctttctctttaatatactttgtccatattttcctctttctcttcctatcaaacatccatgacttccttgtcttctagtacaaaacagagcaataataaccaagatgttgatgagaaaccaataccacacgatcaaaacgtcgtgcaaaagcacgttgcgtt

SEQ ID NO: 12061 - DNA, 269 bp, Glycine max
  Clone ID: 701065277H1
caagttcctaccatagtgctaggcaagtgagtgagagacagagatcacatagcagaatggcttctactcaatgtttcttgcaccaccatgctcttaccacccctgccagatccccatcacaacgcatcatggttagcaccaagcctaaccagcttgtttgcacggcacagaagcaagaggatattgatgtcagcccaatctctcgccggttagctctaaccgtgctcattggtgctgctgctgttggctccaagttcaacctgctgatg

SEQ ID NO: 12062 - DNA, 217 bp, Glycine max
  Clone ID: 701065278H1
tttccagtttctgattcgtcacgtcagacaaaggaaggggttagggtgtgacctgagatcaaaatgttgcggaggcttctctcttctcacctcaaaaccctagcctcctccgccgccgccgccgccaccgccactccccgatctgcttccgcctccgccagattcgccgctctctctcgctcctgcctctacttctcaacccattccgaggatgcta

SEQ ID NO: 12063 - DNA, 270 bp, Glycine max
  Clone ID: 701065279H1
gtttgttccatctcttgcttcttgcttctattacttgcttctttcttcaccatgtcacttgctgggaaaatcaccactgaaattggggttcatgcaaccgctgcaaagtggttcaacctctttgcaacacaacttcatcatgttcaaaaccttactgatagagtacatggcaccaagctgcatcaaggtgaagactggcatcacaacgagacagtcaaacactggacttataccatagatggtaaggctacaacatgtctggagagtatt

SEQ ID NO: 12064 - DNA, 157 bp, Glycine max
  Clone ID: 701065280H1
gatcagacatctgcatcgagatcggagaagacgaagaagaagaagaagagtatgggaacgacggtggcgggtctagcgccgggtctgtcacggaagctgaagaaggttctagaatctcggatcgatacgccagacctcttgtcttcgctcaacacgc

SEQ ID NO: 12065 - DNA, 262 bp, Glycine max
  Clone ID: 701065281H1
ttcacaatcatattgcctttgtttcaaatatgtatttctattagtagtttagttaggctctacctcttgcacacaatccaagttattcaaagttggttatcaaataagtgttataattattgcgtgatgactattcgacacaaatggtggtgctccttcaaggcttctgaagtgtttgttgaataattttcattccaataagattcctttgtcaaaatctactgtggattataacttgaatgctttctcgtggatgagcatg

SEQ ID NO: 12066 - DNA, 265 bp, Glycine max
  Clone ID: 701065282H1
caaaatttcttccgcattcgacttctttgatatcagtataatacttgttgtgtggagcaacagaaaataatgggtttttgcatagcaggtattgttaggcggacttcgttttatacaacccaagcagcctccaagagggtggacgtaccaaaaggctatgctgcagtctatgttggagataagatgagacggttcacaattccagtatcatacttgaacgaaccttcatttcaagaattactcggtcaagcagaagaagaattcg

SEQ ID NO: 12067 - DNA, 263 bp, Glycine max
  Clone ID: 701065283H1
attttctattgccctacaagtttgaagataatagctaccatacatttggagaaggtgggtggttgcaccctcttctgttcaataccacctagaaataaattgataggttatcttgctgtcgacaaactggttagatttgtttcctgggaagtagcaaaagtagctcatctgattttggtttatgtatgcatgtctcacattcttgtcaacacaccacttggtttttatgcttatgcaattcttcttgattctgacaatttatt

SEQ ID NO: 12068 - DNA, 262 bp, Glycine max
  Clone ID: 701065284H1
cgggaaagagaagttaaaggaaccataaaacttaaggggataaactttaaccttttgtttttgcctgcgatgaatacttgtttaaattccggagagtctaatttctgttagtagaaaccttcaaaacaatattaccccgtaaaaagaaaaaaggagtgccttgaaaatcaaggaccttgttcttttactagagtgtttcttatctcaggttgatcagctgatgcctgccgatgttactccttataatttctgctactttagc

SEQ ID NO: 12069 - DNA, 261 bp, Glycine max
  Clone ID: 701065285H1
acctcgagcgaatcggctcagattcaccgccacttctgccgcactccataagctccgtacgcgccccttttcctctcaacctctgatctctgatccctccgatggtggcagcatcgtaattttccgcggcaccgtcgacggcacctcgaaaaccttgagacccagtgtcttggtttctcgcaagtccagcgataaaggcgtcgttcttcaaagaactcaatcgctgcacggtgtttgtccactgttttctgcttcctattt

SEQ ID NO: 12070 - DNA, 262 bp, Glycine max
  Clone ID: 701065286H1
actctccgagcttcactctcttcgcctctgccaaagggagtaaactggggttctcctcctttctgggtcgtgttctctttgcctcccttttcatcctcactgcatggcagatgtttaatgaatttgatgccaatggtggacccatctcgaaagagttgattcccaaactcactgtggtgaagaaaaatttgtcctctaaattgggggtagcactaccagatattgatgcccggcaattcattgctactatcatatttcttaa

SEQ ID NO: 12071 - DNA, 262 bp, Glycine max
  Clone ID: 701065287H1
gagaaacatggcttccttaagctccttagtgctgctccttgcagctctaattctatcccctcaagttcttgcaaactatgagaatcccccagtgtacaagcctcccactgagaaaccaccagtttataagcccccagttgagaagcctcctgtttacaaacctccagttgaaaagcctccagtttataagcctccagtagagaagccaccagtgtacaagcccccagttgagaaacctccagtgtacaagcccccagttgag

SEQ ID NO: 12072 - DNA, 266 bp, Glycine max
  Clone ID: 701065288H1
tcggctcactcgagcgaatcggctcaggaaaattgactgtgacgtagcacatcctgattggtaaactattgaatcctgtgcatacatcctcacttatcctcttcctgcgactctcttctccttggttctccgtattctccctcaatcctattaaccttttcttctttcatttcccaccccattctataatcaatcaatggcaatggcttcttcaatccctaatgcgccttctgcgttcaattctcagagctacgttggtctcagag

SEQ ID NO: 12073 - DNA, 262 bp, Glycine max
  Clone ID: 701065289H1
gtagtacttgtgttcttctatcccttctcattctttcactctttgtggctgaaatatatggaaatagacaagttcaagctcttaacaaactgcacaagtccaccaagttcagaggacattcacaaattgataggagtgagtttgaggtagaggagcttgcttatgatggcatggttcactctcaagagggtctcacagagaaagatagaattgagagtcttccaggacaaccccctgtgagttcttctcactatggagggta

SEQ ID NO: 12074 - DNA, 258 bp, Glycine max
  Clone ID: 701065290H1
tctgaggctcccctcacctctctctccgaaatccccaaattgcctgtgaatgctagacaccctaggcacgttcgatttgatgctctcccatttgcactcaagggcgagcgcattcggttcttgcacgcaatgctggtactaccgctgcatcggcctcgatccctgaattcatcattctttctcgcaccatctttttctattccgattcgatttgttgttgttgttgttgttgttgtgttttgtttcctccttgacgat

SEQ ID NO: 12075 - DNA, 265 bp, Glycine max
  Clone ID: 701065291H1
ctcaatctgactcttcacttcacttcatcgattttgtgattctctctctcaataatggcagcacgctttcaatctgcagctgtactatgccggtgttccctatagggaaagatgaaattcaagtctaagaaaggatggaaatctattgtaccacttcatttgacaggaaaatcggcgacccgtttttctttatttcgcaaagtcaattcagctgcctatggacctggcaaaacacccgtttatctgaatgtgtatgacttgacac

SEQ ID NO: 12076 - DNA, 261 bp, Glycine max
  Clone ID: 701065292H1
ctgctaaatccctagtaagccgccatggtgaagtactcaagggagcctgacaatccaaccaagtcttgcaaggctagaggcgccgaccttagggttcattttaagaacactagggaaactgcctttgcaatcaggaagttgcccttggttaaagctaaaaggtacttggaagatgttcttgcgcacaagcaggccattccgttcagacgtttctgtcgtggtgttggcaggacagctcaagcaaacaatagacactctaat

SEQ ID NO: 12077 - DNA, 263 bp, Glycine max
  Clone ID: 701065293H1
cgttgatcgagataactagaaacagtgtgatgaaaatgaaggtccttgttctcttcgttgctaacattttcgtagcatggcaatgccatgcgtacgatatgttccctctccgaatgaacactggctatggtgcccgtactccggaggtgaaatgcgcaagttggaggcttgctgtggaagcacacaccatctttggctttgagaccattcctgcagagtgcgttgaagcaacaaaggaatacatgcatgggcgaacaatatag

SEQ ID NO: 12078 - DNA, 281 bp, Glycine max
  Clone ID: 701065295H1
cgctcggccttcggaacaagacaaggtttaactttaaccccaaacaaaccttgaagcaaacgaaagcttttcaactcaccacaatgagccaaccctggaattcgctgtctctcgtcaaacatcggagatcaatctcttacttctccaaatcgtacacttccgatgcacctttcaactgctgcaccagaacccacggtttacttatcagacccaacaacaaatttgcgcccaccccatttcgaaacgcggatctgttgcgtgctgagattgacgctgcgaat

SEQ ID NO: 12079 - DNA, 278 bp, Glycine max
  Clone ID: 701065296H1
ctttccattgatttcttgcttctatatattacttgcttcttctcttgatcatgtcccttgctggtaaaatcagctctgaaattggtgttcaggcaaccgctgcaaagtggttcaacctcttcacaacacaacttcatcacgttcaaaatcttactgatagaattcatggaaccgagctgcatcatggtgaagactggcatcacaatgagtcggtcaagcactggacttataccatagatggcaaggttacaacttgcaaggagagtattgaatccgtt

SEQ ID NO: 12080 - DNA, 89 bp, Glycine max
  Clone ID: 701065301H1
tgtaatcataaagtgtgcccatgtgttttttagaaattccctataagttgggatttatctggttggcttcgatacttttgcaccaagtg

SEQ ID NO: 12081 - DNA, 278 bp, Glycine max
  Clone ID: 701065302H1
gattttcgtctttctagacttgggatgaccgaaatatcccacatttcgacagccccacaaggaacccccggctacgttgatccacagtaccatcaagactttcacctctctgacaagagcgacgtgtatagcttgggtgttgttcttgttgagatcataacgggacagaaagtggtggacttttcacgcccacataacgaagtgaacctggcttctcttgctgcggataggatcgggaaagggcttttaaatgagattatagacccattccttgaagc

SEQ ID NO: 12082 - DNA, 273 bp, Glycine max
  Clone ID: 701065303H1
caaaaccctacccccatccaattccaattcaccctcaatcatgggttctgaaggttccactgtcgtcgttcctaggaacttcagattattggaagagcttgagagaggtgagaagggaattggagatggaactgttagctatggaatggatgatgctgatgatatctacatgcagtcctggactgggactattattggcccccctggtactgttcatgaagggcgtatataccagctgaaattattttgtggcaaggattatccagacaatcc

SEQ ID NO: 12083 - DNA, 277 bp, Glycine max
  Clone ID: 701065305H1
tctcgagccgaatcggctcgagcaggttcctggatctagaattacgcgctatcaatggcatcaccagacaatccttgccatactatctatatattgtatactttgtaaacatagtaatgaatatattatatgaaggcttcctaagctcagtagagccagcatttggctgatatggatgctctgcaaccttctctataatatctgcttcaatgcagcatatatacgttcagcaagagtggcacatttcgactcacttcaatcgtgacttgcgatacca

SEQ ID NO: 12084 - DNA, 276 bp, Glycine max
  Clone ID: 701065306H1
cccttcttgtccattcatatatatcacaatttcaactgcaaattttgaacaaaacttaattaagaaatccttctccggagccatggcagatctcaagtccacattcttgaacgtctattctgttctcaaatctgaactcctccacgaccctgcttttgagttctccgatgatgctcgtaattgggtcgaccggatgctggactacaatgtgccgggaggaaagttgaaccggggactgtcagtaattgatagctacagattgttaaaagaaggaca

SEQ ID NO: 12085 - DNA, 274 bp, Glycine max
  Clone ID: 701065307H1
aggatctaaagggggtgcagctgctgatgcgcccaaagcatcaactcttagcaaggaagtcaagtctagtacagttgtaggtgccaacattctcaaggaaggaactgatccaaaaatccagcctgattcagaataccctgactggttgtggcatctgcttgataaacgccctgcacttagtgaactgcgtaggaggaatattgatacactatcttatgaagatctaaaacgctttgttaagctggatacccgagcaaggatcaaggagaataac

SEQ ID NO: 12086 - DNA, 276 bp, Glycine max
  Clone ID: 701065308H1
attgttttgtgcttatagataaaagttctgccaaatcaagaggggttttcagatcatagtgtgtgtgtgtgtgtgttaaacaatggctaagttctttgctgctatgatcttggcactcattgccatttccatgcttcaaacagtggttatggctgctaatgagcaaggaggccacttgtatgacaacaagagcaaatatggaagtgggagtgtcaagagataccaatgcccatcacaatgctcgaggagatgtagccagacccaataccacaagcc

SEQ ID NO: 12087 - DNA, 280 bp, Glycine max
  Clone ID: 701065309H1
ctcgagccgctcgagccgagaaaaccctaattcgctcgcagtcacccaagaggcgaatccttaccattgcacgagatgggtgaagaagtgaaggccgtggttccagagtctgttttgaagaagcagaagagagaggaggaatgggcgttggccaagaagcaagacctcgaggctgcgaagaagaagagagccgagagccgcaaactcatctacaacagagctaagcagtacgctaaggagtacgatcaccaggagaaggaattgattcggttgaaacgcg

SEQ ID NO: 12088 - DNA, 278 bp, Glycine max
  Clone ID: 701065310H1
ctcagaaagatgaaggtggtcgctgcgtatctgctcgccgtcctcggtggcaacaacaccccctccaccgatgacatcaaggaaatcctcgtctccgttggaatagaggcagatgaagataggattgaatcgttcttgtctgaagttaagggtaaggatatagttgagctaattgctgccggtaaggaaaagctggcctcggtgccttctggtggcggtggtgccgttgccgtcgccgctgctcctggtggaggtggcggtggtgctgctccggctgc

SEQ ID NO: 12089 - DNA, 275 bp, Glycine max
  unsure at all n locations
  Clone ID: 701065311H1
cctcgagncgaatcggctcgagccaaaatccaagttacaatgcttgacatttacactggtgggacgacctgaaaacagagcgtacagcttgatgatgttaactaataaattttgtggatagagaggtgtatctttagaattaaattaatgaataagggcttatactctgccctcttttagttataggcacacgattttatatagctttaattgtagagccattccgattctggttgtgtatgatatccactttttagtgtggccccccacaattg

SEQ ID NO: 12090 - DNA, 176 bp, Glycine max
  Clone ID: 701065312H1
cgctacttgttaagggctgcactataccagaatctctcagggaagaggcagtgcatctttgcctattgtggtcactgtggtttcactactgcgccttttggaacgtgctaacgcagcaacttactccgttggaggacctgggggatggaccttcaacactaatgcttggcccaatg

SEQ ID NO: 12091 - DNA, 189 bp, Glycine max
  Clone ID: 701065313H1
ctcattaattgcaagactggcacttcgttgcttggcgatgtccctttctgttctcttcactcttggtcttgcgagagaaagccatgccagatacgaagatttttggcatgctgtttggccaaacactcccattccaagttcattgcgagcccttctaaagcctggccctgcaattgttgaaatcgatga

SEQ ID NO: 12092 - DNA, 276 bp, Glycine max
  Clone ID: 701065315H1
gagaattaaggtttgtagtgcagcaggaagaagcaataatggcgccgaagataacacgtaaggctagcagcaaccccgaattgataaggggaatcggaaagtactcgaggtctcaaatgtaccacaagacgggcatttgggctatcaaggccaaaaaccgtggcgttttacctcgccacggccctaaacccaaacctgaaactcccgctgaaaaaccacccaaattttaccctgctgacgatgtcaagaaaccgcttgtcaacaagcacaaaccca

SEQ ID NO: 12093 - DNA, 277 bp, Glycine max
  Clone ID: 701065316H1
ccgcgcaccggattcgaaccctcgttgtggttaggtcttcttcacctttcgaattttggaatccatgggtcagggaactccgggcggcatgaaccggcagggcgaccggaagccggacggcggcgacaagaaggagaagaagttcgagccgtcggctccgccggcgcgcgtggggcggaaacagcggaagcagaaaggtccggaggcggcggcgcggttgccgacagtgactccggtgacgaactgcaaactgcggcttctgaagctggagcggatc

SEQ ID NO: 12094 - DNA, 257 bp, Glycine max
  Clone ID: 701065318H1
agaattaatcatattcctctctcatgctcactataaacacaaaacccttcccatcctaattaaggtgaaaatgaaggcatcacccattgcttggttcactttggtggttgtgtttcttgtggctgaagttcaagtttcaatggcagtgacatgcagcccagtgcagctgagtgcatgtgtaagtgcaataacctcttcaacccctccatcaaacctcatgctgctccaagtatcataagaaccagaacaccatggcc

SEQ ID NO: 12095 - DNA, 274 bp, Glycine max
  Clone ID: 701065320H1
caatcgatgaactccctaagcaaattgatgatacacagtacccaaaaacattcctctataaagaagaccttcatccaggcaaaacaatgaaagtacaattcaccaagcgtccctatgcacaaccttatggtgtatatacatggttaacggatattaaagacacctctaaagaaggatatagttttgaagagatatgcatcaagatagaagcgttttctggagaagagtagttttgtgctaaatccttgggaacagtaattggttttgccatttc

SEQ ID NO: 12096 - DNA, 276 bp, Glycine max
  Clone ID: 701065321H1
aagaaaacagtgttaaaagcgaggcagacgaagagtgaaactgtggaagcagttgcagaccgagctagttagctagcaagcaagcacagagatggaggcaaagcgaggccatgccctcatgtgcttggcacgtgtttcactcttcctctgcgctctaaccctatccgctgctcacggaagcaccacggttcaagacatcgcgagacagttgaaactcggggacaacgagcttctgcgcacggagaagaagttcaaggttttcatggagaattacgg

SEQ ID NO: 12097 - DNA, 275 bp, Glycine max
  Clone ID: 701065322H1
gcctcggaggagggaatcgcagcgaagtccactatgccgaaccaaattcacgagattaaggacttcctcctcactgctaggaggaaggatgcacgctctgtgaaaatcaagcggacaaggatgtggtgaagttcaaggtccgttgctccaagtacctttacaccctctgtgtgtttgattctgagaaggctgataagttgaagcaatcacttcctccaggtttaagcgtgcaggatgtgtgattcttactgctgtatgaagatcaggtttttctc

SEQ ID NO: 12098 - DNA, 277 bp, Glycine max
  Clone ID: 701065323H1
tccatctcttgcttcttgcttctattacttgcttctttcttcaccatgtcacttgctgggaaaatcaccactgaaattggggttcatgcaaccgctgcaaagtggttcaacctctttgcaacacaacttcatcatgttcaaaaccttactgatagagtacatggaaccaagctgcatcaaggtgaagactggcatcacaacgagacagtcaaacactggacttataccatagatggtaaggctacaacatgtctggagagtattgaatccattgatg

SEQ ID NO: 12099 - DNA, 276 bp, Glycine max
  Clone ID: 701065324H1
aacgtctgtctcaagggtggactcgtcacccccatgggcggtggcgtcagttccctcaatgttcagcttcggaaggagcttcacctctatgcttctcttgttaattgtttcaacctccctggccttcccacgcgccatgataatgttgatattgttgtcatcagggagaacaccgaaggcgagtactccggcctcgaacacgaggtcgttcccggcgttgttgaaagccttaaggtaataacaaagttttgttcagagcgaattgctaaatatgca

SEQ ID NO: 12100 - DNA, 228 bp, Glycine max
  Clone ID: 701065325H1
cattcttcagcgactgcgtttttggatcggaacctcttctgcggcgtacaatgggacactcaacgttggaactctcaccaaaaactcgggccggtctcgactgccggtggtgggaatcaatggatgtcaggagtatggctatgtgctgaggagtgctccgacaagccaggaattgctcacaagatcctaaagacagtgtcactaggacatattggtctgcactagtgt

SEQ ID NO: 12101 - DNA, 277 bp, Glycine max
  Clone ID: 701065326H1
gcaaagaaaatacacattacattactaagtctttgttcatttgagtagtagtgatggctagcctcaaggttgcatgtgtggttgctgtgatgtgcatggttgtggtggccatgagtgctgcacccatggcacaggccgcaatcacgtgcgggcaggtcgccggcgacatgtctccgtgcttcagttatcttcgaagcggcggaaaaccgtcgcaggcctgctgcaacggagtgaagtccctcagcagcgcggcgaagaccaccgcggaccgccaggg

SEQ ID NO: 12102 - DNA, 275 bp, Glycine max
  Clone ID: 701065327H1
tatagcccaagccctatacaaccaaaccctaacacacacccatttgattcagtttccatggctagcctcaaggttgcatttttccgctgcagtgctctgcatggttggggtgagtgcacccatggcacatgcagctatcacgtgcgggcaggtgacgaatagcctgatcaattgcatcggttacctccagaacggaggaacgccgccgtcgggatgctgcaacggagtgaagagcctcaatgccgccgccaagaccaccgccgaccgccagacgg

SEQ ID NO: 12103 - DNA, 164 bp, Glycine max
  unsure at all n locations
  Clone ID: 701065329H1
gaaggagagagagagagacatttgtaacgacaagaagcagtacgtatagagggagtggtcanatcacggatcaggactcatgaatgtccattctgagacacacagtagcacagagagaaactccttgtagatgctcaatttgcaagtcaagatctgacatcata

SEQ ID NO: 12104 - DNA, 272 bp, Glycine max
  Clone ID: 701065330H1
gatttatgcttgattcaaaaggttgaaggctagataacactttcagctccagtgaaatgatttctactatctaggttctgagggatttattattgattgattcaacatgttcgtagaggaagtggccacaacgctgaggcaacgtttaaaatttttacctgctttttttgttcctttggtataaccaattgtgaggaaaaaattgaaaagaactaagtgaaggcttttttcttcttcttttgatttgcacagtcccatgagcttgaactctt

SEQ ID NO: 12105 - DNA, 279 bp, Glycine max
  Clone ID: 701065331H1
caggatcctttcaatcttcatcagctttgcttgaacctggatacatattaaagcatgactcttcagcaatgcctaaaacttctattattgacactacagtgtcttcctggtcaaacaactatctgcagaaaaccaccaacgtattgcatgggcaaaaacaaaaagtgaataattgttgcagtagcagtgaaagtccaagagcacagttggttggtgaatctaatggtcgagggaataatagccatccattgagagttcttccggattttgctgaagtat

SEQ ID NO: 12106 - DNA, 272 bp, Glycine max
  Clone ID: 701065334H1
caaatttgcgtgatggcagaatcaagtgaggtagagatagtgggtaaacctgtccaagattcggttttgaattctgaaaatctgccaaaaacttatatctacgaggaatgtggtgccggatttcgagatgctcttgtgccatcacaggatgagaatattccagtgatcgaccttcatcgcctctcatctccatctactgcactacacgagcttgctaaactccatcatgctctccattcatggggctgctgtcaggcaataaaccatgggct

SEQ ID NO: 12107 - DNA, 273 bp, Glycine max
  Clone ID: 701065338H1
ttctttagccggtcataaacacgagtccattcccagcaccgtaatccgccgtgtggttgtaccttagtagtagttcgttcggcactccggcttcggctgcaatccgttgcaagctgttaccgatccgattcgggtatgtcatgaacagcccataatccttttacacgtgtcggtttccgcatgtacagtttacggtcatgttgatgttcacgttgtctggtatctgattcggcgggtaactgttgactctgcctacccaatcctccgtcgtga

SEQ ID NO: 12108 - DNA, 272 bp, Glycine max
  Clone ID: 701065339H1
agcatcatcatcattatcatgaagtctctagtgaaagcagatctggtataattaaccacaaagggtagcaatttcttagaagcaagacatagtttgatttcattttccttaattacctttgcagaatccaaaatggtgctttagttagtttgcatcataaagctatgccaggccatttcctttgatatatatgtataatagaaaaagcatatgttttacaatttacatatatcacttaaaagttgcttgcacttaattatgaggatcatcgg

SEQ ID NO: 12109 - DNA, 269 bp, Glycine max
  Clone ID: 701065340H1
gtcctgttaaaaagagctgcaatcataattctagtatgtttatagaaagctcattttgtatcatgcatgtactctagctatactaagtttcaccttgaacttgcttgtgactctgctctggatagaacagacttgtacagtaacgaaaaacgactgtaaccaggtccttttctccatcattgtctcattttgtgttatgcttatgttgatttagcttgtatggaagtcagttccaattgtttggattagtaaacaacattaatatcaaa

SEQ ID NO: 12110 - DNA, 272 bp, Glycine max
  Clone ID: 701065341H1
tccatccactccctcgcacaggcatcaggtgagtttgttgtgattcgaatggagggaagtggaggtggctgtggcagttgcggtggttcaccttctgcacctgtgaagcaatacttgcaggaattctcgaagctttctcagtactatctggatcaatccactccccatgccctctacagatggattcggactttcgtgattgcatccatctacgttctgcgtgttgtctatgtgcaggggttttacattgtctcctacggcctcggaatcta

SEQ ID NO: 12111 - DNA, 274 bp, Glycine max
  Clone ID: 701065342H1
taagctatggaagagtgttacaagttgggaatagcaaagtccattggcatatgcaattatggtatcaaaaaactcactaaactcttggaaatagccaccattcctcctgcagtcaatcaggaggaaatgaacccatcttggcagcaagggaaactcagggagttctgcaagcagaaaggaattcatgttagtgcttggtcagctcttggcgcttataagatattttggggctctggagctgtcatggagaatccaatcctccaagacatagcaa

SEQ ID NO: 12112 - DNA, 202 bp, Glycine max
  Clone ID: 701065345H1
caattagggtttttgtgatctgcagctacgatgggtaagggaacggggagtttcggtaagaggaggaacaagacccacaccctctgtgtgaggtgtggccgccgcagcttccacctccagaagagtcgttgctctgcgtgcgcttaccccgctgcgcgcaccaggaaatataactggagcgtgaaggccattaggagaaaga

SEQ ID NO: 12113 - DNA, 254 bp, Glycine max
  Clone ID: 701065346H1
caggtgctatattagttgttgtgaagaatgacttggcgaagttgcaactcacttcccctgtgttgactagcaagggcgagaagattgcacttagtcgtcgtgttgagaagcattggcgtcttattgggtggggacaaatccaagctggaatcactctggatgtccctcccgtccctcaactgagctgaaccatgataagagacagatcacaagaattaccagcagctataaaaaccttagacgattttagatgt

SEQ ID NO: 12114 - DNA, 275 bp, Glycine max
  Clone ID: 701065349H1
ctattctcagcagcttcggctagggttcagaaacgaaaaagggttcggtgttctgttcgcgatgagagccaagtggaagaagaagcgtatgaggaggttgaagaggaagcgccgaaagatgagacagagatccaagtagtgcgttaaacctagtttgtttctgttgcttttacaattgcttatgttgtcgaatgggacacccagttgttagtggcactggtttctcctttttgatgtttgatacattttgttggattcaagtagtttatgttcgt

SEQ ID NO: 12115 - DNA, 274 bp, Glycine max
  Clone ID: 701065350H1
tcttgacaaaatggccgtaacagaagcaaacctaaagaaggctggcttccacacatgggagcagtcaattctcaaggatccacatcttatcactccaaatgcactttcatacaaatcagcaatgagagagaatctgttgaggcagggatacagaattgttggaatcattggagaccaatggagcgatctgcttggagaccacagaggcgaaagcaggacctttaagcttcctaatcccatgtactacattgagtagtaccttcacctctctcaa

SEQ ID NO: 12116 - DNA, 271 bp, Glycine max
  Clone ID: 701065351H1
ctctgctcttatcactaaataattatctattgtatcaataattcccgtattgttggaatatatggcacccgatatggtctcagtttaatgaagcaaatcaagaagatggaagttagtcagcacagtacatccttttgtgagttctgtggaaagtacgctgttaagatgaaggccgtgggtatttggggctgcaaagattgtggaaaagtgaaggctggaggtgcttacacattgaatactgcgagtgctgtcactggccggagcaccattc

SEQ ID NO: 12117 - DNA, 271 bp, Glycine max
  Clone ID: 701065352H1
tgagtttgttgtgagctataagctagtttatcgtgaggagaatatgaagtcgtttgtcttctttgttgctgcagtagttttggtagcatggccatgccatggcgcaggctaccaaaggttccctctccgaatgaaaactggctatggtgagcgttcttcggaggtaaaatgcgcaagtcttaggcttgctgtggaagcacacaacatccgagtcactaaaaccattcctgaagagtgcgttgaaccaacaccggactacattaatggcgaa

SEQ ID NO: 12118 - DNA, 259 bp, Glycine max
  Clone ID: 701065355H1
ctgatcctggctagtcgctgccgtgggccaatctcacatttctggaggataggtaattgggtgttgagagtggattgtcatgcttccaagtatttcaacctatgatcaagaagacatcgatattgggtaatactgagggagttgattatagtgctatagcatgcgtcaagtctgcttaagtaataactcatcttaatagctatatggctgcacgatctcgtgatagcgatatgtccgtcattgcagagtattaaatcat

SEQ ID NO: 12119 - DNA, 276 bp, Glycine max
  Clone ID: 701065356H1
cctcgagccgaatcggctcgaggttctcttctcttctcatcatcttacttttgtccaatcagaacttacataacatgagcatcgctcttctctctccgaaatccccatctcccttcacttctgagctctggacgagatcccagatctcaccatctttcacgcactcttccatcagattcaccctttcgtttaacgcaaactcataacttgaaggttaatggctgctccaccggcaagggctcgtgccgattacgattatctcataaagcttctctt

SEQ ID NO: 12120 - DNA, 276 bp, Glycine max
  Clone ID: 701065357H1
cttcagagaaaatggcggtacctctgctctcgaagaagatcgtgaagaagagggtgaagaagttcaagaggcctcagagtgacaggaaattttccgtcaagacaaactggcgtagaccaaagggtatagattcccgtgttaggagaaagttcaagggatgcactttgatgccaaacatcggttatggttctgacaagaagacccgccactatctccctaatggttttaagaaatttgttgttcacaatgtgaaggacttggaactgctcatgatgc

SEQ ID NO: 12121 - DNA, 250 bp, Glycine max
  Clone ID: 701065358H1
cgtcattttggattagctacatggacttctgcaccttcagttcctttcctttgcaaaactgtcaaaggaacatttggatatttggctcctgagtatttccaacatgggaaagtatcagacaagactgatgtatatgcttttggagtggttttgttggaactcattactggccggaagccgattgaggcaacaagaccttcaggagatgagaacttggtcttatgggctaaaccttttctacaaaaaggga

SEQ ID NO: 12122 - DNA, 131 bp, Glycine max
  Clone ID: 701065359H1
atatattggcagacatccattctgtcatgcactatagtggtttgtcctacaatctgttagcggaagagactggattcaccaacgtcgatgtggcgcagcttctcaggagacacgctcatcacaatccctaa

SEQ ID NO: 12123 - DNA, 275 bp, Glycine max
  Clone ID: 701065362H1
cccacccagtttatcactctcctccaccacctcctaccaacaagccttacatctatgcgtcacctccacctccttaccactattagctagcatagctctatggatatgaagaatatgtgcaacgaataaaagaaagcgatagaaaaggaagaagaagcgcttcgcgatgcacgaaagagaagaattggaagcaaagtttcggcgttttgtcttttataaaaaaaatgttaaatcattataattttctatgatagggattggtttcttgtcttttt

SEQ ID NO: 12124 - DNA, 275 bp, Glycine max
  Clone ID: 701065363H1
gctgctgggaggaaatgaactaacttcgggttcgcaatgtgcggactatcatctcgaaatcagactggtgaggaggaatatcctgcaaaatgtagtctaccacatcgagcagcgtcattgaataggttccgtcagaagaggaaagagcggtgctttgataagaaagttagatatagtgtacgtcaagaagttgcactcaggatgcatcgaaataagggtcaatttacttcatcaaagaatcaggatggaactaatagttggggctcagatcaaga

SEQ ID NO: 12125 - DNA, 274 bp, Glycine max
  unsure at all n locations
  Clone ID: 701065364H1
cgcgcccaagagagagagagagagagaggcgcgaaaatgagcggacgcnaggggaagaagaagggagcgagctttgtgatcgattgcgcgaaccggtggaggataaaattatggacattgcttctctggagaagttccttcaggagaggattaaggttggcggcaaggccggtgcactcggcgattccattactgtcactagggacaagagcaagatcaccgtcacctccgacagcaacttctctaaacggtatctgaaatatttgaccaagaa

SEQ ID NO: 12126 - DNA, 273 bp, Glycine max
  unsure at all n locations
  Clone ID: 701065365H1
gaaaaatttacacaatattttaagacgcacataaacttcctctgtcactacccactcctctctctgtctccgcctttcgcattgcaagccctctctttctttgcttttccttccccctttcagtttcttcaacgctgcaactatccatggcaaacttctggctcatctccgatgtgtanccactgttcgctgcggttggcgccgctgttgggatctgtggattccaattggttcgtaatatctgcatcaaccctgaagtcagggtgaacaagg

SEQ ID NO: 12127 - DNA, 234 bp, Glycine max
  Clone ID: 701065367H1
tatatctgtcagaagaacatgcacaacaggccgtaacagaagcaaacttaaagaaggcgggctaccacacatgggaaaaattaattctcaaggatccacaagatccttccactccaaatgcagtttcatacaaaacagcagcgagagagaaactgataaggcagggatacaacattgttgggatcattggagaccaatggagcgatctcctcggagggccacagagggcgaaag

SEQ ID NO: 12128 - DNA, 269 bp, Glycine max
  Clone ID: 701065370H1
attcctctctcattctcactataaacactaaacccttcccatcctaattaaggtgaaaatgaaggcatcacccattgcttggttcactttggtggttgtgtttcttgtggctgaagttcaagtttcaatggcagtcacatgcagcccagtgcagctgagtgcatgtgtaagtgcaataacctcttcaacccctccatcaaacctatgctgctccaagatcaaagaacagataccatgcctctgccaatacctcaagaaccccaatctca

SEQ ID NO: 12129 - DNA, 271 bp, Glycine max
  Clone ID: 701065371H1
tattagtttgttccatttcttgcttcttaatttcttgatcatgtcacttgctggtaaaatcagcattgaaattggggtgcatgcaagcgctgcaaagtggttcaacctctttgcaacgcaactccatcatgttcaaaaccttaccgaaagagtgcatgataccaagctacatcatggtgatgactggcatcacaacgaatcgatcaaacactggacttgtaccatagatggtaaggttacaacatatcacgagagtattgaatccgttgat

SEQ ID NO: 12130 - DNA, 271 bp, Glycine max
  Clone ID: 701065373H1
ctgcaatctaatgggagccacattgttgatgggaactggagggccctagggaagcttcttatatactgttcaggatgcacaaaaggtggcttgttcaatagcattcagattcctggtcactttgtttatcagacacgattttctagaacatcaggaaagagctttcttttgccacaatgcaggactgatgttttgtatgtatgtgatccttgtgagcatcttgaccaaggtgaggaaggagatgtaggattcttccgtggcatttttaagt

SEQ ID NO: 12131 - DNA, 272 bp, Glycine max
  Clone ID: 701065374H1
gaggtcgagtttcacagcagcaatggtgtacgtcaaggctcagaaatcaaaagcctacttcaagagatatcaagtcaagttcaagagaagaagagagggaaaaaccgattaccgtgccaggattcggttgattaatcaggacaagaacaaatataacactccgaaataccgatttgttgttcgctttagcaacaaggacattgttgcacaaataatatctgctagcattgctggcgatattgttcttgctgcagcatatgcacatgagctgc

SEQ ID NO: 12132 - DNA, 232 bp, Glycine max
  Clone ID: 701065377H1
gtaactctttattttattttctttctttctttctccgatcgcatagctcgctcgcaaccaccatgccttcccgaagaagaactctcttgaaggtcatcattctcggtgacagtggggtggggaagacatctttgatgaaccaatatgtgaataagaagtttagtaatcagtacaaggcaaccattggagcggattttttaaccaaagaagtgcaattcaaagatagggtttt

SEQ ID NO: 12133 - DNA, 269 bp, Glycine max
  Clone ID: 701065378H1
attccattgttgttatattgcattgtagccggagaagaagagaagagatagcggcgaagaaagaaagatgacggaggcatatataaggaagaagcccgggatggcgagcgtgaaggacatgccggttctccaggacggtccaccaccaggcgggttcgctccggtccggttcgcccggcgcatccccaacaagggccccagcgccgttgccatcttcctcactgctttcggcgctttctcttggggcatgtaccaggtcggccatggca

SEQ ID NO: 12134 - DNA, 274 bp, Glycine max
  Clone ID: 701065379H1
acttgggatgcgccactggacaccccagttttgtgatgtcctgctccttcaccaaccaggtcattgctcagcttgagttgtggaaggagaagagtaccggcaagtacgagaagaaggtttacgttttgcccaagcaccttgatgagaaggtggctgcacttcacctgggcaaacttggcgctaagctgacccagcttagcaagtcccaggctgattacatcagtgtgcctgttgatggtccatacaagcctgctcactacaggtactaagtgat

SEQ ID NO: 12135 - DNA, 273 bp, Glycine max
  Clone ID: 701065380H1
catgagtttacatctatacaaggttctcttagtaatgaagccagagacaaagttgtcaaggagttcaaagatggtttgactcaagttcttatatcaacagatattcttgctcgtggctttgatcagcaacaggttaatttggtcatcaattataatcttccaaataaacacagtttacgggatgaaccagattatgaagtgtatctgcacagggttggcagagctgggcgttttgggcgcaagggggctgtatttaacctgatatgtgatgaa

SEQ ID NO: 12136 - DNA, 272 bp, Glycine max
  Clone ID: 701065381H1
attcgttcacctcctcaacctctgcagcgccttcgatccagaaaacatgactaagagaacaaagaaggctggcattgttggaaaatacggtacccgttatggcgccagtctgcgtaagcagattaagaagatggaagttagtcaacacagcaagtttttctgtgaattttgtggaaagtatgctgtgaagaggaaagctgtgggaatatggggatgcaaggactgtggtaaagtgaaagctggcggtgcttacactttgaataccgcaagtg

SEQ ID NO: 12137 - DNA, 267 bp, Glycine max
  unsure at all n locations
  Clone ID: 701065383H1
gatggcattgggtgttcctgctcttctcctgatatacgtggctaacgattctggcattgttgncagcatcttggtcgtgctctgggtcctcaattttaggggtggcttggcttgggattctgtcganaaggttttatcttcaatcttcatccagttcttattgtcattggcttactagtccttgggggtgaagctattataagctacaaagcattacccctgaagaaggaagtgaagaaattgatacaccttgttttccatgccatc

SEQ ID NO: 12138 - DNA, 268 bp, Glycine max
  Clone ID: 701065384H1
ctgatatagtgaatagaaatggctaaaaacgagttgaggcttttgggtgttgtgttcagtccatatgccctgagggtgcagattgcccttaacctcaagggtctagattatgaggttgttgaagagaccttgaatcccaaaagtgatctgcttcttaagtccaaccctgtgcacaagaaaatcccagttctactccatggagataaagtgatatgtgaatctgcaatcatagtagagtacatagatgaggtttggtccaacaatgctc

SEQ ID NO: 12139 - DNA, 268 bp, Glycine max
  Clone ID: 701065385H1
cttagtcccaattttctagggttttattcattttccgatggcttctccagatgttgagtaccgttgctttgtcggtgggctcgcttgggtcactgacgaccatgccctcgagagagccttctctcagtacggcgaaatcgttgaaacgaagattatcaacgatcgtgagactggcagatccaggggttttggatttgtgaccttcgcctcggagcagtccatgaaagacgcgatcggagcgatgaattgacagaacttggacggccgt

SEQ ID NO: 12140 - DNA, 271 bp, Glycine max
  Clone ID: 701065386H1
gagaccggaagcagcaatggggatcgatctcaagaccggaggtaaaagcaaaaaaaccaaaagaacagcacccaagtccaatgatatctatcttaagctcttggtcaagctttatcgcttccttgttcggagaactggcagcaaattcaatgccgttatactcaagagattgttcatgagcaaggttaacaagcccccattgtctttgtcaaggttgattaagtataccaaggggaaggaagataagattgctgtggtggtgggcaatata

SEQ ID NO: 12141 - DNA, 272 bp, Glycine max
  Clone ID: 701065387H1
gtctgcttcttccgattccggcacgcccccatcaccatggtgaacgttccgaaaacaaagaagacatactgcaagagtaaggcgtgcaggaagcacaccctgcacaaggttacccaatacaagaagggtaaagatagcattgctgcccaaggaaaacgccgttacgatcgcaaacaatctggttatggcggacaaactaagcccgtcttccacaagaaggctaagaccaccaagaagattgttctgaggttgcaatgccagggttgcaagca

SEQ ID NO: 12142 - DNA, 272 bp, Glycine max
  Clone ID: 701065388H1
aaaattctgagataagtgattctctgccttttcaattttcattttaaaaaaaagaaagacaaaaaaaagaaagaagaaaattgtgcatgctggttcttgaatgatcttcgtcctggattcagaattttcggtgacagatctctgctcggacttccataaatgcatatctgtggatgtgttccaccttggctctgtcagattctcgcttgcatgggaggttgtctgggatgcttcccaaatcctaaaggccaatcaacaaacaaagacaacag

SEQ ID NO: 12143 - DNA, 253 bp, Glycine max
  Clone ID: 701065391H1
tctcgctcttgcaattagtcctcttcctacaatccgcacctaaactctagggttctgacatggacactggtggaaagatcaagaagggcgccggaggaagaaagggcggcgggccaaagaagaagccggtttcaaggtccgtcaaggccggtctccaattccccgtcggaagaattggccgttatttgaagaaaggaaggtacgcccagcgtgtcggtaccggtgctcccgtttacttggccgaatttctcga

SEQ ID NO: 12144 - DNA, 199 bp, Glycine max
  Clone ID: 701065392H1
gtgagctataagctagtttatcgtgaggagaatatgaagttgtttgtcttctttgttgctgcagtagttttggtagcatggccatgccatggcgcaggctaccaaaggttccctctccgaatgaaaactggctatggtgagcgtacttcggaggtaaaatgcgcaagttttaggcttgctgtggaagcacacaacatcc

SEQ ID NO: 12145 - DNA, 258 bp, Glycine max
  Clone ID: 701065393H1
gtttcgtttccaggtttcggcgcaatccttctgcttcaaggaaggagagcttgttattctctatcaacaagtaaaatgtcaggtgaagagggtgtcattgcagttgagccagctgctgctgctgctgccatcccaggcgagccaatggatatcatgactgccttacaacttgtgctcagaaaatctctggcttatggtggtttgtcgcgtggccttcatgaaggtgcataagtgattgagatgcatgctgcacaactc

SEQ ID NO: 12146 - DNA, 270 bp, Glycine max
  Clone ID: 701065394H1
cgagagggttaaacacttagcatctgctgagggtacttggtagacaccacactacccataatccacgtcgaaaacaacaacccaagggtttttggttcttctatgtttctatgtttgcttgtgttgatgatttggaacaagattgttgttgttgttccacaagccgaggctcgagcattttttgtttttggtgattcgctagttgacaatggcaacaataactacctattcaccactgctcgtgccgactcatatccttatggcgttgac

SEQ ID NO: 12147 - DNA, 263 bp, Glycine max
  Clone ID: 701065396H1
ggcgtaacaaaagttgcgtaccatactctgattcattagtgaagaaaaatggcaaccatcatcgccggcatcccaactacatcgatcactcgcgcaggtcttgtgctcaaacgacctgttggagcctcgtcctctaccgttcttggattgccagcaatggctaaggcagggaaagtgaggtgctccatggaggaaaagccttcaagcagctcaaatatagggatgggggcaccttgtaagcagctgcatttgccgaaaccatg

SEQ ID NO: 12148 - DNA, 272 bp, Glycine max
  Clone ID: 701065401H1
tagcagccacacctcccgcagcagccatggttctcaaaactgaactatgccgattcagtggtgccaagatctacccaggaaagggcatcagatttgtacgttgtgattcttaggtttttctgtttgctaactcaaaatgtaagatgtatttccacaatcgcctgaagccttcaaagctcacctggactgcaatgtacagaaagcaacacaaaaaggacattgctcaagaagctgtgaggaacaggagacgtgctgccaaaaagccttactct

SEQ ID NO: 12149 - DNA, 282 bp, Glycine max
  Clone ID: 701065402H1
cctggatgcagagtttggaattgtgaacggaaccatgacaaccacgcattcctacactggagaccagaggcttttggatgcttcacaccgtgacttgagaagagccagggctgcagcacttaacattgtcccaaccagcacaggagctgccaaggccgtgtctctagtgttgccacagctgaagggcaagctcaatggaatagcgctccgtgtgcctacacccaatgtttcagttgttgaccttgttgtgaatgttgagaagaagggtcttactgctgaaga

SEQ ID NO: 12150 - DNA, 278 bp, Glycine max
  Clone ID: 701065403H1
ataaaagaaaagaaaaacttcacttcacttgcatgccaaatgagaacaacctcttcttagaataatttcctcggtgtttaagccttgtcgatttccgaacaccaatccgagttaattaaacaatgagagtttcgacagaaaagttagagacagagccggagagcaaaaagataaaacgcattcgtggcggcggcggcggggactcgagcaataagcaccctttgtaccgcggcgtgcggatgcggaactgggggaaatgggtgtcggaaatccgcgag

SEQ ID NO: 12151 - DNA, 281 bp, Glycine max
  Clone ID: 701065404H1
ccctctttcaccgcagtgttagggtttctgtagcctccaaccagaaagagatggaaatggctcccaaacatcctagtacggctttgtttgttggattgaacaagggtcacgttgtcaccaagaaggagttgcctccacgcccttcagatcgtaaggggaaaacaagcaagcgagtgcactttgtgaggaacctcattcgagaggttgccggctttgcaccttatgaaaagcgaataactgagttgctcaaggttggaaaagataagagggcactgaaagtt

SEQ ID NO: 12152 - DNA, 227 bp, Glycine max
  Clone ID: 701065406H1
atttctccctcttcgctctctctcagtgaccagagacagatgatgatggagatggcgaacgagaacgctgtcgttgcggcactcgcggcgttggtgctactcgcggcgagtgtggcggtggatgctcaggagaactcggacgtgaagacgctggtgaagtacaagcacgggaagaagtactgcgacaaaggatgggaatgtaagggctggtcaatttaccgttgtaa

SEQ ID NO: 12153 - DNA, 208 bp, Glycine max
  Clone ID: 701065407H1
cttgcattcagttagactttgatagtttgattagctctaataaggttaaggaccagagagagaaagagaaataagaagaaaaacacaagatgggttattggaagtctaaggttcttcccaagatcaagaaggttttcgagaagaatagcaccaagaaagctgctgctgctgaggccaccaagtcctttgatgagtcaaaggaggaata

SEQ ID NO: 12154 - DNA, 215 bp, Glycine max
  Clone ID: 701065408H1
aatgtcaacaaatccactcgttatggagaagaagctaaagctggagaaaccgttcaggtacctattgaagaggaacaatccaatgctgctgatggagaactacctgcattaaaagataaagctgatgacaaagtaactgagggctctgaagttttcctgagaaaggatgaagaaaagtattgagccacccaggggacgacacaaaacaatggggt

SEQ ID NO: 12155 - DNA, 118 bp, Glycine max
  unsure at all n locations
  Clone ID: 701065409H1
caataatttgttagcctgctgttgaaaattcagattctgccttananaagttgtgattataacattaccaggcagagaagagaggacgaaagaagatggagagaagaagggggggggt

SEQ ID NO: 12156 - DNA, 283 bp, Glycine max
  Clone ID: 701065410H1
gcagttgctgcgtcgcaaggtaccggcggcgacggagagctatcttctcaatttccgatcactgcattggttctgttgacgagggttttgttctacttgacttgcatacttgatggcgtcaaagttgcagaagttgcagtccgcagcatgtcaagcatctcaatttgtatccagtcgtggaactaactactacaggcaattgctggaacagaacaagcaacacattcaggagcctcctacagtagagaaatgcaagctgctggcaaagcaattgttttacacc

SEQ ID NO: 12157 - DNA, 274 bp, Glycine max
  Clone ID: 701065411H1
cagataactagaaacagtgtgatgaaaatgaaggtccttgttttcttcgttgctacaattttcgtagcatggcaatgccatgcgtacgatatgttccctctccgaatgaacactggctatggtgcccgtactccggaggtgaaatgcgcaagttggaggcatgatgtggaagcacacaacatctttggctttgagaccattcctgaagagtgcgttgaagcaacaaaggaatacatccatggcgaacaatatagatcagactccagaacagtta

SEQ ID NO: 12158 - DNA, 283 bp, Glycine max
  Clone ID: 701065413H1
cccagtttcgtgctttcccgccgccgctacactgccaccgtcttccccgccgtctccgccagacatggcagaagaggattcaaagcctctgaactacatctccgaggtcattctcaagaagaggaagaacaccgaagcatgggctttaaggaaaaaagaacagttccagcaaaagaaataccaatccatcaagaagccggaggatttcatccacgagtatcgcaacaaggaagtggaccttataagaatgaagcggagggtgaagaggaaagtgcctgaagct

SEQ ID NO: 12159 - DNA, 174 bp, Glycine max
  Clone ID: 701065414H1
agctagtttatcgtgaggagaatatgaagttgtttgttttctttgttgctgcagtagttttggtagcatggccatgccatggcgcaggctaccaaaggttccctctccgaatgaaaactggctatggtgagcgttcttcggaggtaaaatgcgcaagttttaggcttgctgtgg

SEQ ID NO: 12160 - DNA, 287 bp, Glycine max
  Clone ID: 701065415H1
cgcctcgaatccacacagttctactcttcacctctaaaccctctctctctctctctctcgatctatcatggctacgcccaatcagcaaaccgtggattaccctagtttcaaactcgtcatcgtcggtgacggcggtacaggaaagacaacgttcgtgaaaaggcatcttaccggtgaattcgagaaaaaatacgaaccgaccattggagtggaggttcacccattggatttcttcacaaactgcggaaagattcgcttctactgttgggatactgctggacaagaga

SEQ ID NO: 12161 - DNA, 288 bp, Glycine max
  Clone ID: 701065416H1
aacgaaaccctcttcatcttgttctatctgtgacgagcatcatggcctcaagagcagtgttattgttggctatgtgtgtgcttccggcgatggttgtggccattcgcccagcaaagaaccctttttgcgtgaagggtcgtgtctactgtgacccttgccgtgctggttttgagacctcagctaccacctacattgctggtgctgagattatgttgcaatgcaagagcagggttagcaacgaggttgtgtacacgaagaaggggtacaccgactcaaccggagcataca

SEQ ID NO: 12162 - DNA, 285 bp, Glycine max
  Clone ID: 701065417H1
agcaattctgaaagggaatggaatgagatattaagcttttggatggagatgacactcacaaatagaaagaaagttctctggtgaagataaaagtattgtttttcgccagagcccgtgatctcactggcctgagtgagttgccactggaggtgtcatctggaagtactactcatgattgtttgaaaaagctttttgtcaagtttccaagtttggaagaattaagaggctgcatggttttggctctgaatgagcgagtatacaactgagtcaaccattgttaaagac

SEQ ID NO: 12163 - DNA, 280 bp, Glycine max
  Clone ID: 701065418H1
cgaatttgattgatggctgtaaactgtacttcctcaattcgaatcccaattcagaaatatggatcatttctcaagtaccccaacaaaaaattgatgtccaaacgcagctatgtcccaatgaaaaaggcatcggtactgaggatcacagcatccatcaagaacaaggtttatgaagatcactcccagggcataatctgctaccaagatgagtttggagaaatagtttgtgaagggtatgatgaagggccttgtttccaaagaattccagagacgaccaatc

SEQ ID NO: 12164 - DNA, 224 bp, Glycine max
  Clone ID: 701065419H1
agcaccaacagcatcggcggcgacagtcactctccgacaacaacacttccgcggcgaaaaatgtctctggtggcgaacgaggatttccagcacattctgcgtgtgctgaacaccaacgtggatgggaagcagaagataatgttcgctatgacctccatcaagggtattggaaggagattcgccaacatttctaaaaggccccccttgttgagaaaaagaggggg

SEQ ID NO: 12165 - DNA, 280 bp, Glycine max
  Clone ID: 701065420H1
cattacactcacactctttgtgaaaaaggggagtttcttattctttctagacgcttccattgatcggcgatttcttagacatggcggagcatcacgaacacgaggaagtgaagggctagtccccgttggagaagaaatctgggtagtaccacgaccacgattcgtcatcttcgtcggattccgacaacgagaaaaccagcgcttctgactccttgaagtcaaaggttttcaggcttttcggcagagaaaagcccattcaccatgttcttggtggcggaaa

SEQ ID NO: 12166 - DNA, 279 bp, Glycine max
  Clone ID: 701065421H1
cctgcttccgctctttacttccttttatgcctatcgcccatcactttgcttctttctgcgtttcgtgctcaagctcaatctcatgctccagctcccactttcaagtactgtgaaaagaatgcagactatgctgtgaaggtgagtggagtggaaatattgcctgaccccgtggagagaggagtgccattcacctttaagatcccagcttatactcctgaaccaattcaaagcggggacttgttatatgaaatttcttatgctggaatagaagcacaacct

SEQ ID NO: 12167 - DNA, 232 bp, Glycine max
  Clone ID: 701065422H1
cacatttgcaaagtgttatttttctttttttctcatttgcactgcaaatcgcaatggcttccaacaaggttattgccaccatcatggtgctttctctccttgcctactcaacatcattcaccaatgcatgtcgcacatgccacccaaaacctaccccttctcctcctcctccatcaggaaagtgccctaaggacacattgaacctagggtgttttccagatattctaggtct

SEQ ID NO: 12168 - DNA, 208 bp, Glycine max
  Clone ID: 701065423H1
agaaaatggcaacattgacaacgatagattgaagaaacagtaatatctgagctcacagacagaaacgcccatgatatttgtctattctccacaaaagttaaagggagacgatcacttggtgatagaatagacagcatagataattccaggtatataaccaaaaagggtcataaccagacaaatccagaactccacgtggcaactattt

SEQ ID NO: 12169 - DNA, 277 bp, Glycine max
  Clone ID: 701065425H1
tcgagctcaagcattgcatccctcttgatttgtagtttgttttgtgctttagataaaagttctgccacatcaagaggggttttaagatcatagtgtgtgttttgcaacaatggctaagttctctgctgctatgatcttggcactctttgccatttccatacttcagacagtggtaatggctgctaatgaacaaggaggccccttgtatgacaacaagagcagatatggacatcgaagtgtcaagagttaccaatgcccatcacaatgctcgaggaga

SEQ ID NO: 12170 - DNA, 283 bp, Glycine max
  Clone ID: 701065426H1
cttttataaaaatcttagatctgcttttaacacaaggttttaggagagaagaagaagcaaagacgacggtgtataaatacaagagtagaagaagaagaagaagcaattagagggagagttagtgagcaaggtggatcgaaggcaagggaagaggtctctccctcctcatgaggagaaaaaagaagctttcaactttcctattattcatccaacaccatctcaaaaacgaaaggaacaagcttcaccatcacccttttcactcctcatgagtaacaacaaaaac

SEQ ID NO: 12171 - DNA, 285 bp, Glycine max
  Clone ID: 701065430H1
agcgaatcagattgagatggggtcgtttggtcggagaagcatgtccactgtggcgaaagccgtggaggaaatcaccggcactggcaacaccaagatccgcaaatcttccagcgagctctgcaccttcctcggcatccctcgccaatctcgttccgaaatcgctctcattctctccaagttcatcaaactctataatttcaagagtcccggcattaagaaggacaagatttgggagcagaatttgcagacactgttgcgtggcagaaacaatgttggttttcctga

SEQ ID NO: 12172 - DNA, 284 bp, Glycine max
  Clone ID: 701065431H1
cagtattgtgaaatgttgaaagcagacgagtggcctgtttgtgcatttatttctcaagattgtcgtccagcaaatccatcggaagaagcgcacaatgttcaaacatcgtatgaagtgtgggagaagacattagagatgattggccttccctcagatgctgtggaaaggcttttagatggggaagaagttaaatgccgttatggacaagaacagtaatctaatatacaatatctcccttaatctgtaagggcacttccattatttatagctagtaatgagcattt

SEQ ID NO: 12173 - DNA, 275 bp, Glycine max
  Clone ID: 701065435H1
cgttttgccacttcgaaaccaaattttcttccttcgttggcatctgtgatctcttctcctcataatgagcagatcagggcaaccaccggatttgaagaagtacatggacaagaagcttcagatcaagctgaatgcaaatcgcatggttgttggtactctccgtggcttcgaccagtttatgaatttagttgttgacaacaccgtggaagtgaatggcaatgagagaaatgacatagggatggtggtaatcagatgaaatagtgtggtcactgttg

SEQ ID NO: 12174 - DNA, 123 bp, Glycine max
  Clone ID: 701065437H1
cacaagctctacaataattagtaaaagtatgagagctgagaataaagaaaactttatatctattgtattgatgtcttgatcgatcagcccttttttactgagttaaaataaagaaaagtgtgt

SEQ ID NO: 12175 - DNA, 199 bp, Glycine max
  Clone ID: 701065438H1
agagctaaggttgggaagtaccatctgtaggtttgtggaacaacaccttatatgataagaggctcacgaggaattgaagaagccttattgaaacacttgggagtgaatcgcaatgaagtaacaccagatggtttgttttctgttggagaaatggaatgcatgggatgctgtgtgaatgctcctatgattacagtggctg

SEQ ID NO: 12176 - DNA, 125 bp, Glycine max
  Clone ID: 701065439H1
cagataactagaaacagtgtgatgaaaatgaaggtccttgtgttcttcgttgctacaattttcgtagcatggcaatgccatgctcacgatatgttccctctccgaatgaacactggctatggtgc

SEQ ID NO: 12177 - DNA, 181 bp, Glycine max
  Clone ID: 701065440H1
ccttccttcgtcctccaatggcgactgttccgcacccattatcactacccaagtgtaggttttgctaaccgaacctcctccatctccagatcccctctcaaatgctgcgctcaatctccttctccttcactagttgacaacgcccagaagtttctcgaagcttccaagaaggggaacgtca

SEQ ID NO: 12178 - DNA, 269 bp, Glycine max
  Clone ID: 701065442H1
agaacactctaaggttggatgattgggtgctttgccgtatttacaacaataagggcacgatcgagaaactgcaaccaagcagcgatgttgctcatagcagaaatatctaatcctcggaaatcgaactcatgatgccggagattctgaaaagcggaggaggttgtcttctgccgtttctgcgggtgcatacagcgtcgcaagctatggagacgttggattacatttacttcgacccgtcgaattctatcctcgatgctggacaatgtcga

SEQ ID NO: 12179 - DNA, 252 bp, Glycine max
  Clone ID: 701065443H1
acaaattctatggtaactcatccaacaacgctaatcaatttagtttaacacactaaatggctggaagaaaccagaagagaaaataacgaagtcaccatgccttcttcccctcagtttccccctttgcttgttggtgacagcatggcatcatgcattacaactacagaaaagcatctttctcaagtagctttaggacttcattttgattgtctagcttcgcaacatcgattggagtcttctagatcgcgagcc

SEQ ID NO: 12180 - DNA, 282 bp, Glycine max
  Clone ID: 701065448H1
gtgatacctcagttctactttcaacatggacatccacctccaaatgaactgaaagaacaatgcttgtataaaattgatcggctattctatgatcatatggatggcatgcaggtgcatgaattcagatcaattactaaggaagtttgcaagctgccatcttttttttccacttcccttttccagcagattgacaatggtactggtgttgtgacaaggagaacatttattgtatattggattgatggcaacatgctggtgatggatatagctgctctaatattc

SEQ ID NO: 12181 - DNA, 272 bp, Glycine max
  Clone ID: 701065449H1
cgctctctaagaaacatggctgaagagggtcaggttgtcggcgtccacaccgttgatgcgtggaaccagcaactgcagaatggaaaagactcccaaaaattgattgtcgtggattttactgcttcctggtgtggtccatgccgttttattgccccagttctggcacagattgctaggcatactcctcaagtgatcttcctcaaggtggatgtggatgaagtgaggcctgttgctggggaatatcccattggggacagccaaccttcctcttc

SEQ ID NO: 12182 - DNA, 276 bp, Glycine max
  Clone ID: 701065450H1
atccagatgaactttcatacgaggaattactggcattgagtgaagtagttggaactgagagcagaggtctttcaactgatactattgcctgtttaccttcagtcaactacaagactgggagtggtcaacaggggaggcatgattcgtgtgtcatttgccgggtggactatgaggatggtgagtccttgacagttctttcctgcaaacatctgtaccatcctgagtgcattaacaattggttgaaaataaacaagggttgcccagtttgtagtactg

SEQ ID NO: 12183 - DNA, 125 bp, Glycine max
  Clone ID: 701065453H1
aaaagaagatcctcacccattttcttcgtagccaaacactctgaaattctcagttatgtcgtggcaagcgtatgtggatgatcacctactgtgtgaaatcgaaggtaaccacctcactcacgccg

SEQ ID NO: 12184 - DNA, 271 bp, Glycine max
  Clone ID: 701065456H1
aaaaagttctgttctttttcccacccaattcagttttctcaaatggctcgtacgaagcaaacggctcgcaagtccaccggcggcaaggcgccacgtaagcagctggccaccaaggcggctcgtaagtctgctccggctaccggcggcgtgaagaagccgcacagattccgtccgggaaccgtatcgctccgcgagatcctgaagtaccacaacagtacggaacttctgatccggaagctcccgttccagcgattggtccgtgagatcgcgc

SEQ ID NO: 12185 - DNA, 277 bp, Glycine max
  Clone ID: 701065457H1
gttctctctctctgtgtatattcaaatccatactatcactttcgcatcggtacttctcttttcattgtagcgcagacacaaatcagtaccatacgaatcccgacactacgtgaattaagcatgttgggcagataggttacggttttgtatcttgcaaagtttgtagacaaaggcgttcaagttaagcttactggtggcagacaagtgacagggactctgaaagggtatgatcagttgcttaaccttgtcctagatgaagctgtagagtttttaagag

SEQ ID NO: 12186 - DNA, 277 bp, Glycine max
  Clone ID: 701065458H1
cgcgaacgaaacgctgtcgttgcgccaatcgcggcgttgttgttggtggtgctactcgcggcgagtgtggaggtggaggctcaggagaactcggacgtgaagacgctggtgaagcacatgcacgggaagaagtactgcgacaaaggatgggaatgtaagggctggtcaatttactggtgtaacctcactattactgattatttccagacctaccagttcgagaatctcttctccaatcggaactcgccggtcgcgcacgccgtcggattttgggact

SEQ ID NO: 12187 - DNA, 279 bp, Glycine max
  Clone ID: 701065459H1
ccaggatgcaactggcaacgatatcccaagtaaaacctttgatgtacaaggttatcctagcgtgtacttcaggtcagcaagtggaaagttatcacaatacaacggcggtaggaccaaggaagacatcatagaattcatcgtaaagaacccggataaacctgctcagcaagaacaaggaaaagatgagcaagaacaaggaaaagatgagctttgaaaggagcttttcgtctcataggatatatagacacaaagttacatgtgggttgcacaccttttgta

SEQ ID NO: 12188 - DNA, 279 bp, Glycine max
  Clone ID: 701065460H1
cggttttccaattcacagagcaacacaacgaaccaacaatggcgcagctcgagccgcagtcgcagccgcagcacgggcaagcagcgctggagcaggtgcagtgcttcggtcgcaagaagaccgccgtggccgtgacctactgcaagcgcgggcgcggtctcatcaagatcaacggctgccccattgagctcgtggagccggagatcctccgcttcaaggccttcgagcctatcctcctgttgggtaagagccgcttcgccggcgtcgacatgcgcatcc

SEQ ID NO: 12189 - DNA, 145 bp, Glycine max
  Clone ID: 701065461H1
cgagagtagtcactagtgtagagatgtattgggggaatgtctattgttcatgccattgcttgcattttctacaattctatttatgaagtagcaaatatttctattgagcttcccagttataactttgacatcaatgtccatttgg

SEQ ID NO: 12190 - DNA, 281 bp, Glycine max
  Clone ID: 701065462H1
aaggcttaacctctctcattccccattacctcacctccttcaatcactgctaaattctagggttccgaaatggacgctggcggaaagatcaagaagggcgccggacgtagaaagggcggcggcccacagaagaagccggtttcaaggtccgtcaaagccggtctccagttccccgtcggaagaattggccgttatatgaagaaaggaaggtacgctcatcgtgtcggtaccggtgctcccgtatacttggctgaagttctcgagtacctagctgccgaggt

SEQ ID NO: 12191 - DNA, 264 bp, Glycine max
  Clone ID: 701065463H1
aaccttcgtcttggccctcgattttgccctaaagtactctcagtcacaacagacaccgtcgtcgtcgtcgtcgtcatcaatggcaccgaagcagaccaaggctgagaagaagatcgcttacgatgcgaactgtgcgacctaatggaggagtacggccagatcctcgttgtgaactccgataacgtgggatcgaaccagctccagaacattcgcaagggtctccgtggcgactccgtcgtcctcatggggaagacaccatgatga

SEQ ID NO: 12192 - DNA, 280 bp, Glycine max
  unsure at all n locations
  Clone ID: 701065464H1
ctcttgtctcttgattcccttcttcaccatgtcactatacgcnnnatcancantgaaatcggggttcatgcaaccgctacaaagcggttcaacctcttcgcaacacaactccatcatgttcaaaacctaactgatagagtgcatggaaccaagctgcatcaaggtgaagactggcatcacaacgagacagtcaagcactggacttataccatagatggtaaggttacaacatgtctggagagtattgaatccattgatgtacagagcagaacaatcacct

SEQ ID NO: 12193 - DNA, 279 bp, Glycine max
  Clone ID: 701065465H1
caaaaatggcacctgcaacactgtctctgtctctcctcctcctgttctcactcagcatcgccgtaaccgttagatcgagcgactacgactacgattgtgtgtacactgcatacgttagaaccggttcggtgttgaagggcggaacggactctaagatcgggctgaagctgtacgacaagtacggctactacatctacattaaaaacctcgaagcatggggcggcttgatgggcaagggctacgactacttcgagcgcggcaacctcgacatcttcagcg

SEQ ID NO: 12194 - DNA, 276 bp, Glycine max
  Clone ID: 701065466H1
cgagaagagaagctaaagaaacaaaggagatgggagtggagaagcagttgttgaggtctggcaccggtccgaagccaattcccggtcagaacgtaaccgttcactgcactggtttcgggaagaacggtgacctttctcagaaattctggagcacaaaggatcctggccagaacccattcactttcaaaatcggccaaggttctgttatcaaaggatgggatgaaggtgtgcttggcatgcaaattggtgaacttgctcgtcatcggtgctctccgg

SEQ ID NO: 12195 - DNA, 221 bp, Glycine max
  unsure at all n locations
  Clone ID: 701065467H1
ctataagctagtttatcgtgaggagaatatgaagttgtgtgtattctttgttgctgcagtagttttggtagcatggacatgccatggcgcaggctaccaaaggttccctctccgaatgaaaactggctatggtgagcgctcttcggaggtaaaatgcgcaagttttaggcttgctgtggaagcacacaacatacgatccaccaaaangattcctgaagagt

SEQ ID NO: 12196 - DNA, 274 bp, Glycine max
  Clone ID: 701065468H1
ctctctgctttctctcgatcagggtttcccctcgtctccgagctcgtttcgttctcgaagaatcgatctgcgataatgactcgcggtaaccagagggatcgtgatcgcgaaagggctcaggctagaaccggtggtaaaggcaagcagaaagatgatgggttgacccctgaacagcgcagggaaagagatgcgaaggcgctgcaggagaaggcggcaaagaaagcggcacaggatgcaggagggaataatgcaggtggaaccaaaaaataggcaa

SEQ ID NO: 12197 - DNA, 243 bp, Glycine max
  Clone ID: 701065469H1
ctttgttccatctcttgcttcttgcttctattacttgcttctttcttcaccatgtcacttgctgggaaaatcaccactgaaattggggttcatgcaaccgctgcaaagtggttcaacctctttgcaacacaacttcatcatgttcaaaaccttactgatatagtacatggaaccaagctgcatcaaggtgaagactggcatcacaacgagacagtcaaacactggacttataccagagatggt

SEQ ID NO: 12198 - DNA, 189 bp, Glycine max
  Clone ID: 701065470H1
atttgatcagaagtacaaagctcttcaagacccaaacaacagctccacggaccacccctactgctctgctctgcaatggccgacgaggaacctgttgatcagaagagatatcttgaagagtcttgcaaaccaaaatgtgtaaaaccattactggaataccatgcgtgcatgaaagggatacatggtgat

SEQ ID NO: 12199 - DNA, 270 bp, Glycine max
  unsure at all n locations
  Clone ID: 701065472H1
caaggaatcaacccttcatctcgtcctcaggcttcgtggtggncccattgagccttccctcatggctttggctcgcaaatacaaccaggacaagatgatttgccgcaagtgctatgcccgtctgcatcctagggctgtgaactgccgcaagaaaaagtgcggtcatagtaaccagttgaggcctaagaagaagatcaagtgaattctgggtgatattgtcggtctcacctgcgtgttgttgcgattggaacagggactggtttgatattt

SEQ ID NO: 12200 - DNA, 278 bp, Glycine max
  Clone ID: 701065473H1
agacactacaattctcactgaaagaaagttgctaactcttggcaccagttatcagcttaacatagttgataacaccaaaggcacaacaacattgagggaatgaggcttgtcatatcagctgtatgtgttattgtgctattttcttatgctgctgcgtatgatcctttggatccaaatggaaacataacgatcaaatgggatgttgtgtcatggacaccagatggctatgtagccgtggtaacaatgagcaatttccaaatgtttcggcacatcatgaa

SEQ ID NO: 12201 - DNA, 277 bp, Glycine max
  Clone ID: 701065474H1
ctataagctagtttatcgtgaggagaatatgaagttgtttgttttctttgttgctgcagtagttttggtagcatggccatgccatggcgcaggctaccaaaggttccctctccgaatgaaaactggctatggtgagcgttcttcggaggtaaaatgcgcaagttttaggcttgctgtggaagcacacaacatccgaccctttaaaaccattcctgaagagtgcgttgaaccaacaaaggactacattaatggcgaacaatttagatcagactctaaa

SEQ ID NO: 12202 - DNA, 265 bp, Glycine max
  Clone ID: 701065475H1
caagaagcaagcatcaagcactttcctgatgtgggttatggtgatatcgcttcacgcacatctcatcattgcagctgtgtctaagtctaatggcacaatttccgtgtgcgatggctccgtagaggactgcctcaacgtcgtccacttcgactcagagcttcttcccagcatctccagctcccacttccgcagaatccttgctggaaaatatgatggagttaccaacgatcacataattcctgataaacccttcaagggatgtaaa

SEQ ID NO: 12203 - DNA, 277 bp, Glycine max
  Clone ID: 701065476H1
attgggttctactcctttctctcttcgtttccgatcgatccaattttcttcccatggctacgatcggacacaacaatctcaatgccaaattggttcttctcggggacatgggtgctgggaaatccagcctcgttttgcgctttgtcaagggtcaatttctcgaatttcaggaatcaacaataggggcagcgttcttttcacagacgctggcagtaaatgacgcgaccgtaaagtttgagatatgggacacagcaggacaagagaggtaccatagctt

SEQ ID NO: 12204 - DNA, 278 bp, Glycine max
  Clone ID: 701065477H1
cttagccacgcatccccgaaagcccaccaaacaccgcttcccattcaatttatacgtcaacccagcaatttcagaagcagaagcataagcataagcgttcagttattaagtgtcggtgttgaacgttaaaacctaaaatggccggtaaagggacccattcagattcaaaagcagcaacaattgtgattaaggatctgagattcacataccccggcatccacggcccgctccgccgggttccactcccctcattcagcatttcaatctcactctttctt

SEQ ID NO: 12205 - DNA, 135 bp, Glycine max
  Clone ID: 701065478H1
ccttcactatctctctctcttcaagcaagcgaccatggcggatggaagcaacgggggagttctaatgctggaagccccaccgtcttacggtaggcctaccggttctaacgcggaaataatcgacgcattgcctta

SEQ ID NO: 12206 - DNA, 274 bp, Glycine max
  Clone ID: 701065479H1
cccgaggaacaagcttgatcattatcagatcctgaaataccccctcaccactgagtctgccatgaagaagattgaggacaacaacactttggttttcattgtcgacctgcgtgccgacaagaagaagatcaaggatgcggtgaagaaaatgtatgacatccaggccaaaaaagtgaacaccttgatcaggcctgatggcaccaagaaggcatatgtcaggttgacacctgattacgatgcattggatgtggcaaacaagttgggtgttcgcggg

SEQ ID NO: 12207 - DNA, 285 bp, Glycine max
  Clone ID: 701065480H1
agttgaacggcgaggtagaacgacgacccccttctgcgttttcaccttcaatctcaatcatggccaaagctgaaggtggcaaggaaccaataaatgaacaagcagtagcaaatatgtatgctgcaatgaggtctgagctcaaccaaatttactccaaaataactgaactggagatggaagttagtgagcacacattggttaccaatgccattcaaccacttgaccaatctagacgatgctatcgtatgattggaggggtgcttgtggagagaaccatcaaagagg

SEQ ID NO: 12208 - DNA, 195 bp, Glycine max
  Clone ID: 701065481H1
cgcagtttcttcgtttctctctctctctctctcttcagaagagcagatagacataacccattcagattaagagagagcaatcaattccaatcacaatggcaaatgcgactcaccgatgaacagatctctgagttcaaggaggccttcagtttgcgcgataaggatggagatggttgcatagggaaaaaggatttg

SEQ ID NO: 12209 - DNA, 275 bp, Glycine max
  Clone ID: 701065482H1
ctcatgcttattctccctcgagcgacagataaacacatttttagttgcaactaatgggaactggttaaggttaaacaaggatgcaaatggaagcatcctagagagaaatcctacagatgagagtgtgttaagtggcccaagcagtggagagggtgcccagtgtgcaaatattgtcggaaatcttgggtatactcacctcagtgatggtgatcttctgcgagcaggcgtcaaatctggttctgaaaatggcacgatgattcagattatgattaaag

SEQ ID NO: 12210 - DNA, 128 bp, Glycine max
  Clone ID: 701065485H1
tcctggtggaggtgctgttaatgcagcattatcagtttatttagagtaccttgctacaactttaggatctcgggaacacttggctatagcagaatttcctcgagtctctgtcaattattccacaggtg

SEQ ID NO: 12211 - DNA, 123 bp, Glycine max
  Clone ID: 701065488H1
ccagacttgtatacgtcgccgcttcagcgtacaacatgatcattcccgagaagaaccgtaaagagatctgcaaatacctcttccaagagggagtttgctttgcgaagaaggacttcaatctgg

SEQ ID NO: 12212 - DNA, 273 bp, Glycine max
  Clone ID: 701065489H1
ctcgagccgcatatctttcaccttctaaccatacttttgtatttctcgatttccaaggaacttttggattcttagctgccaccctcatatgatatttcttgaaaccttgtgttaaaaattgtgtccttttgaacttcaataaaaatttgatttttttttcttagtttcatacccacatacccattgttggatttgaactagttttacttgcctcatggcccttcatataagcagcggttgttttactgtgatgtgtaactcaagagttcacag

SEQ ID NO: 12213 - DNA, 276 bp, Glycine max
  Clone ID: 701065490H1
atgaaaaacaagaaattccctacgaatatggaaaaggacgactagaggaccgatcatcacttgtggctgatattcagaatgtgaagccaacacacatttttaatgcagcaggagtaactggcagacccaatgttgattggtgtgaatctcacaagacagaaaccattcgcaccaacgttgctgggactttaacattggctgatgtcagcagagagcatggaatcttgatgataaattatgctactgggtgcatatttgagtatgacaaagctcatc

SEQ ID NO: 12214 - DNA, 276 bp, Glycine max
  Clone ID: 701065491H1
cgatggagaaagtgaaggtgcttcggcgactcctcgagacaccaggggttcaccaggggccagcctgtttcgacgctctgggtgcgaactcatagaatccgctggcttcccctactgcatcaccagtggcttctccatcgccgcttccaggttggctctgcccgacaccggcttcatctcctacggcgaaatgctggagcagggccaactcatcacccaagccgtttccattcccgtcattggcgacgccgacaacggctacggcaatgccatgaa

SEQ ID NO: 12215 - DNA, 276 bp, Glycine max
  Clone ID: 701065492H1
cggcgactgacacagtaattaaaggagctggaaagctgaagctggtgtttgttccagaaggccagggtgaggagactgaattcgaggtttttaacttcactggtgaagggggtgtttcattggctatgtacaatactgatgagtctattcgttcttttgctgaggcctctatggcaactgctttagagaaaaagtggccactttatcttagcaccaaaaatacaattctgaagaaatatgatggaagattcaaggacatatttcaagaagtttatg

SEQ ID NO: 12216 - DNA, 269 bp, Glycine max
  Clone ID: 701065493H1
cgtgattttggattagctacatggacttctgcaccttcagttcctttcctttgcaaaactgtcaaaggaacatttggatatttggcccctgagtatttccaacatgggaaagtatcagacaagactgatgtatatgcttttggagtggttttgttggaactcattactggccgaaccccgattggggaaaaaggacttccgggagttgacactttggccttatgggctaaaccttttctacaaaaagggaaaggagcaattgaagagtt

SEQ ID NO: 12217 - DNA, 273 bp, Glycine max
  Clone ID: 701065494H1
ccagagcttgtatacgtcgcgcttcaggtacaacatgatcattcccgagaagaaccgtaaagagatctgcaaatacctcttccaagagggagtttgctttgcgaagaaggacttcaatctggcgaagacccggagattgatgtgccgaatctgcaggtgataaagctgatgcagagcttcaaatccagagagtacgtgagggaaacatttgcgtggatgcactattactggttcctcaccaacgatggaattgagttccttaggacttacctc

SEQ ID NO: 12218 - DNA, 283 bp, Glycine max
  Clone ID: 701065495H1
acggatttctgtctctctgtcttcattttagtttttacggctagaagaatgtccagctcatcggaatatttggtattttccggccaccacccggcgaactctccggcggaaaagtccactttctctcagactcgtagtctattgagccaatacatcaaggaaaagggtaccttcggagaccttaccctcgggatgacttgcactgccgaaacaaacggttcccctgagacatcgtgtcactctgcaacaaccacggagttgtttcccacgatcatcacgcaac

SEQ ID NO: 12219 - DNA, 285 bp, Glycine max
  Clone ID: 701065496H1
aaacaaccttctttctttttctgtgagcctttctttcaggttattaacttgatcagtgtgcagtgtccaaatcataagggtagttgcaaattgcaatggctaagcatgatgttgagggtggttccttctctgcaaaggactaccatgatcctcctccagcaccgttgattgatgctgaggaactcacacagtggtccttctacagggctttgattgctgagttcattgccacaatgctcttcctttacatcacagtgctcactgtgattggttacaagagccaga

SEQ ID NO: 12220 - DNA, 200 bp, Glycine max
  Clone ID: 701065501H1
ggaaaagaaggaagaaccagctgaagagtctgacgatgacatgggtttcagtctgtttgactaaattaagtaatacttttgttgagtttgctttgttagaattgatgaagttgtttgtctttcattttaggtgctattttagttgctgtcttttcaattcatgttacattgcaactagtttttaaatcccatagttaatt

SEQ ID NO: 12221 - DNA, 272 bp, Glycine max
  Clone ID: 701065502H1
acgcagccgaccagcatcccaaaaccctagctcgcgttctgctttcgtcttttacatcaggatggcgtctcaggtgaagcacgcacttgttgtcaaagttacgggtcgtactggatccagaggacaagtaacccaggttaggtgaaatttttggatgatcagaaccgtcacatcatgaggaatgtgaaaggacctgtgcgacacggagacattctcaccctactcgagtctgaaagggaagcaagaagattgcgctagatggtttcttttgg

SEQ ID NO: 12222 - DNA, 272 bp, Glycine max
  Clone ID: 701065503H1
ctctttcttcctcttcctcagtagtgcgattttcgattctcttctctgcaactatgcctaaccctaaggtcttcttcgacatgaccatcggcggtcaacctgccggccgcatcgtgatggagctctacgccgacgtgactcgagcaccgccgagaacttccgcgcgctctgcaccggcgagaagggcgccgggcggagcggcaagcccctccactccaaaggctcgtccttccaccgcgtgatcccgaacttcatgtgccagggcggcgact

SEQ ID NO: 12223 - DNA, 271 bp, Glycine max
  Clone ID: 701065504H1
cagattagtattccttgtaggccacctagctttcctctcttcttactatccctgtgttcatgtgaaggttaattgaaacataaagacacactcacacaccctgggttcctaaatttcattttgcagtaacaacaaaaaataagatgagttgcaacgggtgccgcgttcttcgaaagggatgcagcgagtcctgtatgttgcgcccttgtttgcagtggatcgaaaccgcccaagctcaaggccacgccactgtcttcgtcgccaaattctt

SEQ ID NO: 12224 - DNA, 269 bp, Glycine max
  Clone ID: 701065505H1
gcaaaattaagcacaaaagcccaaccctctctctcgctgctggtctcccccatttggcattcgcagatcgaatacgagtaatttcactgaatcttattgaagatgtttctcacaagaactgagtatgaccgaggagtcaaaccttttctcctgatggccgtttatttcaggttgaatatgcaatcgatgccatcaagctgggatcaactgcgattggattgaagacgaaagagggtgttgtccttgcagttgaaaagcgcatcacttca

SEQ ID NO: 12225 - DNA, 269 bp, Glycine max
  Clone ID: 701065506H1
ccaggggctccaattcctactcttagccgcagatctctcagggcttgcatcttctcaggtaagttgtgaagatgtacacatcaaggaagaaaatccacaaggataaggatgctgaaccaactgagtttgaagagtcagttgacaggcattgtttgatctggaaaataccaaccaggagcttaaaagtgatctgaaggatttatacataaactcagctgtgcaagttgatgtttctgggaaccgcaaggctgttgttattcatgtccctt

SEQ ID NO: 12226 - DNA, 268 bp, Glycine max
  Clone ID: 701065507H1
cacttgtctccgaattagttatcttgagaaacattattcccattgctatatattatggctagcatgaaggttacatgggtggttgtgatcatgtgcatggccgtggtgggtgcaccgatgatggcgcaagccatgacatcaatgatgtgacggtgaacatggcacagtgcctatcctacctgatgcagggaggaacaccttcaacactttgctgcagcggagtcaagaacattcttggctctgctgtcaccaccgttgacaaacaaac

SEQ ID NO: 12227 - DNA, 75 bp, Glycine max
  Clone ID: 701065508H1
ctttcattcatctctacttgtagagtgtagactagcaactagaaaagcacatcctttgtctactccacactcgta

SEQ ID NO: 12228 - DNA, 271 bp, Glycine max
  Clone ID: 701065509H1
cggagatttcgggacgaaaggcctcaaaacgcttcgtcgtttgtggttactgagtcctgagtgatcttgacatccgacctttgccatgacaggtgcgcttgcttggcaggtcaaaatatgttaataacaaaagttttattgtttagggagagatcgcacgggagttgcccggggtctctctctcgtgtggtgtgtggtgtttgctgtgctctccttttcgttatgccttttattattacctatctgtcgctccactccgtattacgactct

SEQ ID NO: 12229 - DNA, 267 bp, Glycine max
  Clone ID: 701065511H1
ctttgtcgtgagctataagctagtttatcgtgaggcgaatatgaagttgtttgtcttctttgttgctgcagtagttttggtagcatggccatgccatggcgcaggctaccaaaggttccctctccgaatgaaaactggcttggtgagcgtatcttcggaggtaaaatgcgcaagtcttaggcttgctgtggaagcacacaacatccgagcctgcaaaaccatccctgaagagtgcgttgaacccacaaaggactacattaatggcga

SEQ ID NO: 12230 - DNA, 273 bp, Glycine max
  Clone ID: 701065512H1
cagtttgttgtgagctataagctagtttatcgtgaggagaatatgaagttgtttgtcttctttgttgctgcagtagttttcggtagcatggccatgccatggcgcaggctaccaaaggttccctctccgaatgaaaactggtatggtgagcgttcttcggaggtaaaatgcgcaagttttaggcttgctgtggaagcacacaacatccgagtgcgctaaaaccattcctgaagagtgcgttgaaccaaccaaggactacattaatggcgaact

SEQ ID NO: 12231 - DNA, 272 bp, Glycine max
  Clone ID: 701065513H1
cttcccttctccaacatgccaaacgacagcgttctgagtcttttcctcttcgttaccctcttcacatgccttctctctgctaattcccacgatgaccatattttcctaccgagtcaactccatgacgatgactcagtgagtgcactgctaccgacccaaaccttaactacaagccggtgatcggaatcctgacccaccccggcgacggtgcctctggccggctcagcaacgccaccggggtttcttacatcgccgcctcctacgttaaattc

SEQ ID NO: 12232 - DNA, 277 bp, Glycine max
  Clone ID: 701065515H1
cagaagagcgtcgcagttgtaaccctaatcagaagaagcgcagttcaagcgagtgacagccaccagccatgggtcgtatgcacagccgcggtaagggtatatcctcttctgctttgccctacaaaaggacacctcctagctggtcaagatctcttcgcaagatgtcgaagaaaatatctgcaagtttgcgaagaaaggtttgaccccgtctcagattggtgtcattctcagagattctcacggtattgctcaggtcaatagcgtcactggcagcaaa

SEQ ID NO: 12233 - DNA, 277 bp, Glycine max
  Clone ID: 701065516H1
cgcgccaaagcaaccacttgatcggtctcttaaacttcctaacattcctgcacccgactccgatcctacgaggcgggatatggctgagcagcagggcgaacaacaccgactgcctcaagttcctgcagtggccgctcatcatcatcgcgtcagatcatggtcgtgtccctggcggggttcgccggcgcgtgttaacgcaacaccttcctcatgcggctctacctcgtcgtcatgttcctggtcattgccgttctgatcgggttcatcatatgcgcct

SEQ ID NO: 12234 - DNA, 276 bp, Glycine max
  Clone ID: 701065517H1
ctacaagctgaagtatccagcaccaggggatctacacttagcaaagagggtgaaggagctactcttaggatcagggtttagccatgtggatgaagataagaaacgtgggcttgaccatggtgcatgggtgccactcttgttgagtacccagaggcagacatcccagtgtgtcaactctctatttcatcaaacaaaggtggtacctatcactacaacatgggaaaggctttggctcctcttaaggatgagggtgttcttatcgttgggtctgggagt

SEQ ID NO: 12235 - DNA, 127 bp, Glycine max
  Clone ID: 701065519H1
cctcactcaaactcgggatcacagagaccaacaacagttcttgcactgaggtttcacgatgttgctggaacttgcacttggtttgtttgtgttagctttgtttctgcacttgcgtcccacgcaaaat

SEQ ID NO: 12236 - DNA, 268 bp, Glycine max
  Clone ID: 701065521H1
cctggctttatgaccccaactgcactttataccaagacactgaaacctggagatattatggtttttccacaaggacagttgcattttcaggttaattctggaaacggaaaagccactgcttttctggcattcagtagtgaaaccctggagcacaactacttgaccttctgttatttggcaacaccttgccttctgacttggttgcacagactaccttccttgatgttgcacaagtcaagaaggttaaggctcgttttggtggcagagg

SEQ ID NO: 12237 - DNA, 268 bp, Glycine max
  Clone ID: 701065522H1
cattaacactaataacagcacactaaaggtgaagtttgccagacacaagatgggaaggaaccattttcagcagcaacactgtgctgatgggagcatgtggatggagagtcagggtcagcaacagagctatgccttccaaaagagtcttggagccctgataacaactatggccacaaccacaagcaatccccaggcatgcacatgaacatgaacaacaacaacaacaacaaaaggcttggtgcttttgctgctgtggactctgacttct

SEQ ID NO: 12238 - DNA, 259 bp, Glycine max
  Clone ID: 701065523H1
cggcatagtcactcactcacatattgaaaccgaaaccaaaaacctcgccgtcgacgacaacacgatgccgagcttcaggatgagaaacttgttatccagtgttaaaaagaaaaccatcgaaaacagaaacaaaacttcacaaactgcatttccattacaaaagaattagcacgtttagtggaagaagaagaagaagaagaagaagttaacgaggaaggcttcaacatcaaaagctctgccccgtcacacactcacggtg

SEQ ID NO: 12239 - DNA, 265 bp, Glycine max
  Clone ID: 701065524H1
tgtaggttgtggaacagcttagtggcgaaacccctgtgttttccaaaggttagttctcatccagtttgtaaatgggtagttcagtaatggacatagatctcaaatctgtgttcattggaagtttatgttttaaaattaattgatcatttgtgtctcattctatcattttttttaagaggtatagattgctggtgaagtggttttgtagaattctccccccagatttagggtagtctattttagggttatgaattgaagcttcatt

SEQ ID NO: 12240 - DNA, 192 bp, Glycine max
  Clone ID: 701065525H1
caaaaaaaaaagcattaaagagtggccaccagaacatgttgtttttcaattcaaactctctctctctctcctttctttctttctcccctgtcgatccgagttagcattccaaggagcgagtaagtgactcggtggtacaggggcgttttctcgtttcgccgcgcatcattcgatttcgctccgttccacaaa

SEQ ID NO: 12241 - DNA, 271 bp, Glycine max
  Clone ID: 701065526H1
cacaaatcaaagccatggccacctccaacttctctattgttctctccgtctccctagccttctttttggtgctacttaccaaggcacactcgaccgataccgtttctttcaccttcaacaagttcaacccagtccaaccaacattatgctccaaaaagatgctagtatttcatcctctggggtgttacaactcaccaaagttggcagcaacggcgtgcccacctcgggatctctcggtcgtgccctttacgctgccccaatccagatttgg

SEQ ID NO: 12242 - DNA, 268 bp, Glycine max
  Clone ID: 701065528H1
gtgaatgtatcacttgggaacctattgacaccctccttctcgccgctggtacattgctcagagaattctaatgtgtttgcttctgtttaaaccttggactttgctggagtgcaaatttggacccagtgctctatgcgttccttgcagtggtcccatcatctgggatagacattaggccctttatacctccacagcagctgagccccgtgactacaatagaattctctgagcaatgtaccagctgcgagaaggaagctgtgaatgtatc

SEQ ID NO: 12243 - DNA, 274 bp, Glycine max
  Clone ID: 701065530H1
cgacaattagggtttgtagtgtagcaggaacaagcagcaatggcgccgaaggtaacacgcaaggctagcagaaaccccgaattgataaggggaattggaaagtactcgaggtcgcagatgtaccacaagacgggcatttgggtatcaaggccaaaaatggtggcgttttacctcgccacgaccctaaacccaaacctgaaacacccgctgaaaaaccacccaaattttaccctgctgatgatatcaagaagccccttgtcaacaagcacaaacc

SEQ ID NO: 12244 - DNA, 276 bp, Glycine max
  Clone ID: 701065531H1
cagaatttgggtacaattaaatcgtcaaacttgtgtactgagataattgaatattcaagtccaactgaaactgctgtgtgcaatctggcatcaattgcactaccacgatatgtaagagaaaagggtgtaccaatggagtcccaccatccaagcttgttggaagcacatgctctggaaatcggtattttgactttgataaactagcagagattactgcactggtcacaacaaacctgaacaaagtaattgatgttaattactacccagttgaaaatg

SEQ ID NO: 12245 - DNA, 278 bp, Glycine max
  Clone ID: 701065532H1
cggtggtggaaaggtttcgttcaaagtcacactcacctccgatccaaagttacccttcatcgtgtttagcgttccagacgcggcaccttttactgccgttctcaaattcgccgccgaagaattcaaagtcccgccccagaccaggctatcatcaccaacggtagcttttagcctttgggatcacaaaagcttggccacacccgcaatgtttttggattaagaaaatactttttatcatcgatttatcgttggtctcatggtgttggcataaatcccca

SEQ ID NO: 12246 - DNA, 273 bp, Glycine max
  Clone ID: 701065533H1
cacctgcctttttagcttgcagctgccgtccgtgcacagaggagtcttaggaggaacaactgtagagaaaaggatctgccaaattcgctagaaaattcaccggaaacaccacccgttatccaattaaaccagatttttggacatttgtgaagttgaattgctatccaactgctattcccatttctaaaccttgttacacgagcatcttgatcaatggtctagaaagggaaatagcagttgagtggtgcttcaacgataagttattggatttag

SEQ ID NO: 12247 - DNA, 269 bp, Glycine max
  Clone ID: 701065534H1
gctataagctagtttatcgtgaggcgaatatgaagttgtttgtcttctttgttgctgcagtagttttggtagcatggccatgccatggcgcaggctaccaaaggttccctctccgaatgacaactggctatggtgagcgtcttcggaggtaaaatgcgcaagtcttaggcttgctgtggaagcacacaacatccgagtctgcaaaaccattcctgaagagtccgttgaaccaacaaaggactacattaatggcgaacaatttagatcag

SEQ ID NO: 12248 - DNA, 268 bp, Glycine max
  Clone ID: 701065535H1
cagtttgttgtgagctataagctagtttatcgtgaggcgaatatgaagttgtttgttctctttgttgctgcagtagttttggtagcatggccatgccatggcgcaggctaccaaaggttccctctccgaatgaaaactgctatggtgagcgttcttcggaggtaaaatgcgcaagtcttaggcttgctgtggaagcacccaacatccgattcttcaaaaccattcctgaagagtgcgttgaaccaacacaggactacactaatggcga

SEQ ID NO: 12249 - DNA, 266 bp, Glycine max
  Clone ID: 701065537H1
cgttcatcgagtacaaagttgatgtgatctttgctggccatgtccatgcttatgaaagatcatatcgctactctaatgttgactacaacataacaggcggtaacaggtatccattacctaacaaatcagcacctgttacataacagtcggagatggtggaaatcaagaaggtcttgcttcaaggtttttggatccacagccagaatattctgcttttcgagaagcaagctacggacattccacactggagataaaacataggaccc

SEQ ID NO: 12250 - DNA, 263 bp, Glycine max
  Clone ID: 701065538H1
gctactcgcactcttcaggtggagggaagaactgtgaaagctcaaatattggatactgccggacaggaacgatacagagcaattacgagtgcctactaccggggtgcccttggagctcttcttgtctacgatgccataaaccaaccacattcgaaaatgttagccgatggctcaaggagctaagggatcacgccgatgctaacattgtcatcatgttgatcgggaactagactgatctcaagcatctcagagctgttgccacc

SEQ ID NO: 12251 - DNA, 268 bp, Glycine max
  Clone ID: 701065540H1
cagagagagggagtcagagaaaccctaggtaagaagaaaagatgccggctggtcatggtttgagatcccgcaccagaggctccttctctcgtcctttcaggaagaagggaaccatcgccctcaccacatacctgagaactaccacgtcggcgactatgttgacgtcaaggttaacggtgccgttcacaagggaatgccccacaaattctaccatggccgcaccggacgcgtctggaatgtcaccaaacgtgctgttggcgtcgaagtc

SEQ ID NO: 12252 - DNA, 270 bp, Glycine max
  Clone ID: 701065541H1
cgctctgcttcaacattgcggaagcagaagaagcgccgcagctatgcgtgaagtactccagagaacccgacaatcccaccaagtcctgcaaggccagaggcgctgacctcagagttcattttaagaacactagggagactcctttgccatcaggaagttgccccttgttaaagctaaacgatacttagaggatgttttggcccacaaacaggctattcctttccgacgcttttgtggtggtgttgggaggacggcccaggctaagaacag

SEQ ID NO: 12253 - DNA, 268 bp, Glycine max
  Clone ID: 701065542H1
ccttttaagggtaaaagttgaaacgattcctatttcataacgaagaagatcttgccagtctcagaaacagaggcgagtgacggtatcagaattggagaagagaggggtagaagcaaaaattatataagcttttgtgcttcaaatagcaacaactacagcgcatagagggttttgcagttttgtgtcatgatgatggattctgaaggattggagaatgggattgaagagttgaaattgaaggaagagaagggtaatgcacatgcacagc

SEQ ID NO: 12254 - DNA, 270 bp, Glycine max
  Clone ID: 701065546H1
cttttattgacatcctcaagcttcaatttgctttgtgcttactcatctatctattataaccaaacactcttcttcatattcttcttcttcttcttgttcttgttctatctgtgacgagcatcatggcctcgagagcagtctattgttggctatgtgtgtgcttccggccatggttgtcgccattcgcccagcaaagaaccctttttgcgtgaagggtcgcgtctactgtgacccttgccgtgctggttttgagacctcagcaaccaccta

SEQ ID NO: 12255 - DNA, 269 bp, Glycine max
  Clone ID: 701065547H1
ctcagtctctaatatttttctcactgtcttgtctctccagagaactgtatagacagatatggcagctgcaacatctggtgctgtgttaaatgggtttggatcttccttcttgagtggaggaaacaggagccaaacccttcggccactgctattggaggcaaagttggtgctgctgctgttactgttagtcctagaagactcattgtggtagctgctgctgcaccaaagaagtcatggctccctggtgtcataggtggtggcaacctcgt

SEQ ID NO: 12256 - DNA, 277 bp, Glycine max
  Clone ID: 701065548H1
ccctcgagccgattcggctcgagcaagccctaaccctaattcccaataccactcattcccctgacccgatcgtttcgaagatggccgatttcaacctcgccctggtgatcgtggcggtggtggtgtgcgtgatcgtgttcctgggaacgtgtacctcctcgtgaactaccagcaccccgatgacgccaaccaggcctacttccccaaattcgtcgtcgttttgggcctctccgtcgccgccatctccatcctcatcctccccgccgacgtcgcgaat

SEQ ID NO: 12257 - DNA, 273 bp, Glycine max
  Clone ID: 701065549H1
ctagcctcagtaatctgagacagaaacaaaaacaatgaaggtttccattgccaagttccactcccttcccctatgttttttccttctcttggccttcaacacaaaacccctcctagcagcagaaccagagccagtggttgtaagcaagggaaccctttggagccaggagtagggtactacgtgtggccactttgggctgatgaaggaggcctcacactaggccaaacaaggaacaagacatgccctctttatgttatccgtgacccttcattc

SEQ ID NO: 12258 - DNA, 269 bp, Glycine max
  Clone ID: 701065550H1
ctcccatagcagcgatgggaatcgatcttaaggctgggggtaagagcaaaaagaccacaagaacagcacccaaatccaatgacatctacctcaaattacttgtcaagctttatcggttccttgttcgaaggactggcacaatttcaatgctgttatactcaagcgcttgttcatgagcaaggttaacaagcctccaatttctttgtcaaggttaattaagtatacaaaggggaaggaggataaaattgctgtaatagtggggactgtaa

SEQ ID NO: 12259 - DNA, 267 bp, Glycine max
  Clone ID: 701065551H1
ctctgctcgtgcctctagggttatcatatctccatttccatttcctctctctcagtttccaagaatcttaagctatgggacagtcttacccaaccgtgagccctgattaccagaaggccgttgagaaggcagggaagagctcagaggcttcatcgctgagaagagatgcgctcctctaatgctccgtttggcatggcactctgctggaacttacgacgtgagctcgaagaccggtggtcccttcggaaccataaagcacgcctccga

SEQ ID NO: 12260 - DNA, 266 bp, Glycine max
  Clone ID: 701065553H1
ctttaaagatgcagagtctgcaacagaaggcttccgaatggagcggtgtttccatagacgacgctttcggcatcgacgacaccaatctcttccagaaactcggcctccaaaccttcattaacctctccaccaatttcacaacagggtttacgatgacgaggaagactggtttcgttcaatattcgcgaattctgagaaggagaatgccattcaaaaccaatacgagttcttcgtgcagcgaatgggtggtcctcctctcttttctc

SEQ ID NO: 12261 - DNA, 265 bp, Glycine max
  Clone ID: 701065554H1
ctggtattctctgtcggcattctcttagagttctttcaacaggcacttgctttcagattccagatagatatcttcctattcgatggcgtcggatcaacatgccgtcttctaagcttcttcaaagtgcaccaaatgacatgctgaaagagttaagttgttacaaaatatggtttcatctctgatgacagaatctgctaaatctaaggcacggttagatattgcaacagaacaagtaaccctccttctgtctcgcataagagaacaa

SEQ ID NO: 12262 - DNA, 266 bp, Glycine max
  Clone ID: 701065555H1
caactccatccgcaatgggaatcgatttgaaggcaggaggtaagtccaagacgaccaagcgaaccgcccccaaatccgatgatatctacctcaagcttctcgtcaagctgtaccgttttcttgttcggaggactggggtaacttcaatgctgttgtcctcaagcgccttttcatgagcaaggtcaacaagcccccgctatccctctctagattgatccgttacacgaagggaaaggaggataagatagctgtggttgttggtgccg

SEQ ID NO: 12263 - DNA, 265 bp, Glycine max
  Clone ID: 701065556H1
cgaagaggttcaaatttcccgagaacagtgtcgagctttatgctgagaaggtcaacaacagaggcctctgtgccattgctcaggccgagtcgcttcgctacaagcttctcggtggcctcgctgttcgcagggcttgcttggtgttttaagattcgtgatggaaagtggggccaaaggatgcgaggtcattgttagtggaaaactgagagctcagagagccaagtccatgatattcaaggatggatacatgatttcttctggacaa

SEQ ID NO: 12264 - DNA, 267 bp, Glycine max
  Clone ID: 701065557H1
ctccagatgaactttcatacgaggaattactggcattgagtgaagtagttggaactgagagcagaggtctttcaactgatactattgcctgtttaccttcagtcaactacaagactgggagtgatcaacatggaagcatgattcgtgtgtcatttgccgggtggactatgaggatggtgagtccttgacagttctttcctgcaaacatctgtaccatcctgagtgcattaacaattggttgaaaataaacaaggtttgcccagtttg

SEQ ID NO: 12265 - DNA, 268 bp, Glycine max
  Clone ID: 701065558H1
ttaacctttctcattccccatctcctcaccttattcagcccctgctaatttctagggttccgaaatggacgctggcggaaagatcaagaagggcgccggaggaagaaagggcggcggccctaagaagaagccggtttaaggtccgtcaaagccggactccaattccccgtcggaagaattggccgttatttgaagaaaggaaggtacgcccagcgtgtcggtaccggtgctcccgtttacttggccgcagttctcgagtacctagctg

SEQ ID NO: 12266 - DNA, 217 bp, Glycine max
  Clone ID: 701065559H1
cgaataaacttggatatgcatgtcggtgatgtcttgtgtgtgttaaattatatatgtggaagtcgtcaacgtgatacatatgaatattaatgaatgtcttatgatcgattttgctaagtaaaaaaaaaaaaaaaaaaaaaaaaaaaaaaaaaaaaaaaaaaaaaaaaaaaaataaaaaaagagggaggatgcccgatcaaagcgggtgtaggtctgg

SEQ ID NO: 12267 - DNA, 268 bp, Glycine max
  Clone ID: 701065560H1
cgctttgagaatagagtgatcataagacgagagagtatatctggattctgcgaagaaagcagccggcaagctaagaagggagcgtaatgggcgaacattgtttgaccttgaacaagttctcatgtccaagaaggaaatttgacacctcaggaggcggatattcttctatcatgcaaatctaaatctttgagagatttcactgctggtgcacttgctgcgggcacagctgcatgggctgcaacttggaaactcagtaaaccatttcgaa

SEQ ID NO: 12268 - DNA, 270 bp, Glycine max
  Clone ID: 701065562H1
ctaacccaaaaccctagcggcgcctgctttcttcgttcgtcttttgcatcagccatcaggatggagtctcaggtgaagcatgctcttgttgtcaaagttatgggtcgtactggatccagaggacaggtgactcaggttaagtgaagtttttggatgatcagaaccgtcatatcatgaggactgttaaaggaccagtgagagaaggagacattctcaccctactcgagtctgaaagggaagcaagaaggttgcgctagacggtattttttt

SEQ ID NO: 12269 - DNA, 271 bp, Glycine max
  Clone ID: 701065563H1
tcgagagttgttttattcatgtcgtgaactctctcccttcatctagctcgagtttttttcttgcttccgggagctctgaacttgaccgacgtcgttttcacatcaaaacccttcaacaaaaaaatggcgttcttcttgaacaaactagtatcgcttcccattttcgatctcactctcagaagactgaagatttggcttcttttcctcgccgtcgattccacgtcgaaccaggggctcgtgaaaaagctctcttggcagaagatgcaactct

SEQ ID NO: 12270 - DNA, 276 bp, Glycine max
  Clone ID: 701065564H1
attacattacattacctgccgactagtttacgctatcagcaataagaagtcggtcgctcagatacgcacagatctgatctgatctgatctatctgaagccgaaaacgccgacggtgatgatgaagatggggtgttcacgttgtccttcttcctcttcctcatcctcttagtggcgctcttcccctcgtcgctctccgagatccgcttctccgagatccgaaacgacgatcgccgcatcatccccttcgatcagtttggattcacccacaagggtcg

SEQ ID NO: 12271 - DNA, 271 bp, Glycine max
  Clone ID: 701065565H1
cacctcaaacccatttccttgatatcttagttatctaattacctcaattaatcccttaattgcaagcatcatggctgaggagaaacaccaccaccacttccaccaccacaagggcgatgatgtgcctggcgaggttgatataagaaggaggagaagcaccacaagcatcttgagcaccttggggaacttggtgctgcggctgccggtgcttatgccttgcatgagaagcatgaggccaagaaagacccagagcatgctcacaggcacaagg

SEQ ID NO: 12272 - DNA, 267 bp, Glycine max
  Clone ID: 701065566H1
ccagagaagagaagagagtttcaagaatggggagcgaagaggagaagggtgaattctacttgcgatactacgtgggccacaagggcaagttcgggcacgagtttctggagttcgagttcagacccgatggcaagctcgctacgcgaacaactccaactacaaaaacgacaccatcatccgcaaggaggtttacctccaccctgccgttttgcgtgagtgccgccgtatcatcgccgagagcgaaatcatgaaggaagacgacaacaa

SEQ ID NO: 12273 - DNA, 259 bp, Glycine max
  Clone ID: 701065567H1
attaggggaagttgagatgtgaagctgttgagcttttgggtgagtccatttggtaaaagggttgagtgggctttgaaactgaagggaatagagtatgagtatattgaagaagatatcttcaacaagagcaattcccttctcagttgaacccggttcacaagaaggttccggttcttgttcatgcccacaaaccgattgcagtgtcattcgtcatcgttgaatacattgatgaaacatggaagcagtatccactgttacc

SEQ ID NO: 12274 - DNA, 264 bp, Glycine max
  Clone ID: 701065568H1
cgaagaaggggtatgttgagttcgaggagtcgccgccggacgatttcgatccggcgcatccgtacaaggacccggtggcgatgctggagatgagggagcacatcgtgagggagaagtggatccaaatcgagaagccaagatcattagggagaagctccgatggtgctaccgcatcgaaggcgtcaaccacctccagaagtgccgccacctcgtcaaccagtatctcgagtccacccgcggcatcggttggggcaaggacggtcg

SEQ ID NO: 12275 - DNA, 265 bp, Glycine max
  Clone ID: 701065569H1
ccctctagccgaatcggctcgagctaaatcgttcaacctcatacccaaccctccgatattctttacccgctttaatcttcgctctacttttcgggggtcagatcttaatgccgaaggttcgtatgctgtttgaatttgttatctattgggagtggagtagtatttgagatcgagcgtaaaatatataacaataataaaagaagcaaaggcgatgtttttgtttgattggttttatgggattctcgcatcgcttgggttgtggcag

SEQ ID NO: 12276 - DNA, 259 bp, Glycine max
  Clone ID: 701065570H1
cattctccaatgcggtatgttgatgttgggattcctgccaataataaggggaagcatagcattggttgtctcttctggctattagctaggatggtactgcagatgcggggtactattcgtccaggtcacaagtggatgtaatggtggacttattcttctatagagaacctgaagaggccaagcaacaagaggaagatgaagcaccacctgcccaagattatgccatttcagacttcaatgccgctggcattggcagctt

SEQ ID NO: 12277 - DNA, 261 bp, Glycine max
  Clone ID: 701065571H1
cttcaagaccggcgccgagcgtaaggcggctgccgagagcactctctctgcatacaaagccgcacaggacattgcgaatgccgaactgcctcctactcatccaattaggcttggccttgctcttaacttttctgattttactacgaaatccttaattctccggatcgtgcctgcaaccttgcaaaacaggcttttgatgaagctattgctgaattggatacactgggagaggagtcatacaaggatagcactttgatcatg

SEQ ID NO: 12278 - DNA, 266 bp, Glycine max
  Clone ID: 701065572H1
ccaaagtgcttctctcctctgtctttttctctctcttgctatccttttggctagtcgcactgctgcaagtgcaactccaagaagcgcagtgccaagccaccatgtttcaacattcaacagaagcctttttccttcacttttctctttggtttcggttcttctgcttaccaggcagaaggagcagcaagtgtagatgggagaggaccaactatatgggacacctacactagacagcatactgaaaatgatttgggatcatagcaccg

SEQ ID NO: 12279 - DNA, 261 bp, Glycine max
  Clone ID: 701065573H1
cccttcagtggggggtttggttcatccttgattgccatggatcagagaacatatgaactcataggccctgattaccctggtaatagagctgaagatgttaaaaaccctggcttgggttggatgatgggtttcatgttgttgtcagtttccttggactttttagtcttgtgccacttcgtaaggttatggtcttgatgtataagcttacatatcccagtgggacagctacagcaatgctaatcaacagtttccatacaaaaa

SEQ ID NO: 12280 - DNA, 263 bp, Glycine max
  Clone ID: 701065575H1
cctgagttgagtttacatagccacaacgtggtgaagttttatttatattatttccaactgaattgcttgatagtttgttttccaactatgttgtatctttgctgatcatgctttgtgcttgatacaaaattgtccagctcatggtgcctttttaattttcacattttgataagatttccttcagcgtcatggatacatgttatgttacaccaggagttgaaatttttacatttattgttaacttgttgagtttaatgttgatc

SEQ ID NO: 12281 - DNA, 266 bp, Glycine max
  Clone ID: 701065576H1
cagagttgctgcttcttccgccactcagcacttcgctccctctgtgcttcaccaaccatggccgaaatcgaagctaccgttccagatccctctcaaatcgacgtcaaacttttcaaccgctggagcttcgacgacgtgaggttactgatatgtctctggctgattacattggagtgtccccgtcaaagcatgctacatatgttcctcacactgctggtaggtactcagtgaagaggttcaggaaggcgcagtgccccattgtcgag

SEQ ID NO: 12282 - DNA, 268 bp, Glycine max
  Clone ID: 701065577H1
cagagattcactgaaacagagcgcagaagaaaatacataaactaatccagaaaatgagcagcggcgctggaaaggtggtgtgtgtcaccggcgcttccggttacattgcttcctggatagtcaaattcctcctcaatgcggctacaccgttaaggccaccgttcgcgacacaagtgatccgaaaaacataaaccacttggttggcctcgacggtgctaaggagacgctgcacctctacaaggcgaatcttcttgaagaaggttccttt

SEQ ID NO: 12283 - DNA, 201 bp, Glycine max
  Clone ID: 701065578H1
caagcttcaatttgctttgtgctcactcatctatctattataaccaaacactcttcttcatattcttcttcttcttcttgttcttgttctatctgtgacgagcatcatggcctcgagagcagtgctattgttggctagtgtgtgcttccggccatggttgtggccattcgcccagcaaagaaccctttttgggtaaagggt

SEQ ID NO: 12284 - DNA, 271 bp, Glycine max
  Clone ID: 701065579H1
cgatgatccacgttcttttcctctttgctcttgtctcgttcacttcccatgcttctgtcaatgatttctgtgtagcagacctaaaaggtccagatagcccttcaggctatcagtgcaagccacctaacacagtcacagggatgactttgtgttctctggctttgtagctggaaacaccacaaacactttcaatgctgcattaacctccgcatttgttactgattttccaggtgtgaatggtcttggtgtatctgtggcacggttagacata

SEQ ID NO: 12285 - DNA, 276 bp, Glycine max
  Clone ID: 701065580H1
cagcatatattccattctctctgtgtatctccctacctctcccttcccgatgcagaccctcgtcaagaccctcaccggcaagaccatcacccttgaggtggaaagctctgacaccatcgacaacgtcaaggccaagatccagacaaggaatgaatccccccggactagcaacgtctcattttcgccggaaagcaactcgaggacggccgtacccttgctgactacaacattcagaaggagtatactcttcacctcgtcctccgtctacgtggtggt

SEQ ID NO: 12286 - DNA, 268 bp, Glycine max
  Clone ID: 701065581H1
ctatccttgcccgaagcaccaaaaacatcacattgacgccctcagtgctcatgggattggtactttcgatgttgtggtagtgaacctgtacccattttacgataaagtcacatcagctggaggcgttgaatttgagatggaatctgaaaatattgacatcggtggtcccgccatgattagagctgctgcaaagaaccacaaggatgttttggtagtggttgatacagaagactaccctgcccttctggaatttcttaaaagaaaccag

SEQ ID NO: 12287 - DNA, 110 bp, Glycine max
  Clone ID: 701065582H1
cgagaatttccaagttgcaaatgtagataattgacattttagattcttgtttccacaaactcactttcagatgtcattcatttttgttcaattaatttgaatctggcagc

SEQ ID NO: 12288 - DNA, 188 bp, Glycine max
  Clone ID: 701065583H1
cgcgatgctaacgggaagtgcgttggtgcaaagttgataacagcaacactgtcaggcattggttatggattgactgacaacggtatctttcttgggtaccctattgttggatttagcaaccggatgcaggcatcaggacatgctgtgaacaatccatcatttcgactatccaaagttctagatcgcga

SEQ ID NO: 12289 - DNA, 265 bp, Glycine max
  Clone ID: 701065584H1
ccagaagaaaaaaacacagcgtcctagatttcctcttctctgcttcggaagacagagaaaacaaacaaaacaatggcgttcgcttctttcctcggcagagtcctcttcgcttctgtcttcatactctctgcttacaacaatttaatgaatatggagttgatgggggacctgctacaaaagcactcagacctaagtttgatgcctttacacatcgggtgcattctcaagtgggctttcaaattccagagattaatctgaaattttt

SEQ ID NO: 12290 - DNA, 263 bp, Glycine max
  Clone ID: 701065585H1
aagttctctctgcttctctctcttagactcacaaccctattgcgtgctttacaatcgaccccgattatggacaacagtcacctccctcgaagaatcatcaaggaaacgcagcgtttgctcagtgagccaacacctgaattagtgcgtccccttcggaagacaatatgcggtatttcaatgtgatgatccttggcccaactcagtcgccttatgaagggggagttttcaagttggaactatgtttgccagacgaatatccaatg

SEQ ID NO: 12291 - DNA, 261 bp, Glycine max
  Clone ID: 701065587H1
cgaataatgaggaggttttgcagaagttgggacaagccatgggtcttgccaattcgggagatgcaggtgcctctgctgaaaattctggggcagatgagaccgaagatttgggaaatgaagatgaatcaattgttatcatactgctagtgttggtgatgtggagggcttgaaaaatgcactagcctctggtgctgacaaggatgaagaagattcagagggaagaactgctttgcattttgcctgtggatatggcgaggtaaa

SEQ ID NO: 12292 - DNA, 266 bp, Glycine max
  Clone ID: 701065588H1
cccagacacagtggagaagatcacattcgaatgcaaattggctgctggcgccaacggagggtctgctgggaagctaactgtcaaataccaaaccaaaggagatgctcagcccaacccagacgacctcaaaattggcaagtcaagtctgatgctcttttcaaggccgttgaggcctaccttttggccaatcctcattacaactgatccaattcgatcttcagtattcagtgatctgcaaagaccttgttttatattatatacaagag

SEQ ID NO: 12293 - DNA, 265 bp, Glycine max
  Clone ID: 701065590H1
cagggttttcgctgaccggtgcgcagtcgagcctccagaagacgaatcgaaaatgccgtcgcacaagacattcagaatcaagaagaagttggcgaagaagatgaggcagaacaggcccattccctactggatccgatgaggaccgataacaccatcaggtacaacgcgaagcccgtcactggcgtcgcaccaagcttggattctgaggtgtatgctctgcctaggttcaatttatccaattaattagtgttttattttcttgagg

SEQ ID NO: 12294 - DNA, 266 bp, Glycine max
  Clone ID: 701065591H1
ccaggtttgaattcaaaggatggtagcaaagaagagaatgatttgagcggtttaagcagcaaggtgtcctcttcagctatgcttctaacacctcagagtgaggatgagatattgcaggccagcaatttgaagaactcacattcaatgagctaagaactgctacaaggaactttcgtccggatagtatggtgggtgaaggcgggtttcgttctgtgtttaaggggtggattgatgagcacacacttgcccctactaaaccagggaca

SEQ ID NO: 12295 - DNA, 263 bp, Glycine max
  Clone ID: 701065592H1
cttctcttgcggctagggttttagcgcacgtcttctagatttaaggcagatgggtaaggcaaaggttcacatcagtattgtggtcattggccatgtcgactctgggaaatccactaccactggtcacctgatttaaagcttggaggcattgacaagcgtgttattgagaggtttgagaaggaagctgctgagatgaacaagaggtctttcaagtatgcctgggtgctggacaaacttaaggctgagcgtgaaagaggaatcac

SEQ ID NO: 12296 - DNA, 265 bp, Glycine max
  Clone ID: 701065593H1
ctgaggtagaacccttccactgtggtgactctgcgacgggtgcctacaagtatgtttcagagctatggcgcaagacgcagtctgatgtcatgcgcttcttgcagcgggtgaggtgctgggagtataggcagcaacctccattgttcgtttgacaaggtctacccgccctgacaaggctcgtcgcttgggcttcaaggctaagcagggctatgtgatttaccgtgttcgcgttaggaggggtggccgaaagagaccagttcccaaa

SEQ ID NO: 12297 - DNA, 268 bp, Glycine max
  Clone ID: 701065594H1
caagttctcaaatcactcttcttcttcacccttctgatctgctaattctcaaggtattcaaaattgggtggttttcgattgaactgtgatgtccaagccactgctaggcatagcggaagaggaaggtcaaagcaatgtactttgttggtttcttcctcagccaccatggaaagtgtgtgcctgaatagctcaaaactgaaagagcgcaactacatggggttatctgattgttcatctgtggacagctccgcgccgtccttctcagatg

SEQ ID NO: 12298 - DNA, 272 bp, Glycine max
  Clone ID: 701065595H1
cccagacacagtggagaagatcacattcgaatgcaaattggctgctggcgccaacggagggtctgctgggaagctaactgtcaaataccaaaccaaaggagatgctcagcccaacccagacgacctcaaaattggcaaatcaagtctgatgctcttttcaaggccgttgaggcctaccttttggccaatcctcattacaactgatccaattcgatcttcagtattcagtgatctgcaaagaccttgttttatattatatacaagagtcttct

SEQ ID NO: 12299 - DNA, 228 bp, Glycine max
  Clone ID: 701065596H1
actatgctccacaagcccacacacacacaaattctcaaacccaaatcccaagtctcagaaaaccctaattcgcagtgaaaatgagagaactcttgcacatccagggagggcaatgcggtaaccagatcagagcgaagttctgggaggtgatatgcgcgcgcacggcatcgaccacaccggaacgtacagctgcgactcggagctccaattggagcgcatcaatgttta

SEQ ID NO: 12300 - DNA, 89 bp, Glycine max
  Clone ID: 701065601H1
cgtaatcataaagtgtgcccatgtgttttttagaaattccctataagttgggattgatatggctggcttcgatacttttgcaccaagtg

SEQ ID NO: 12301 - DNA, 267 bp, Glycine max
  Clone ID: 701065602H1
cagataactagaaacagtgtgatgaaaatgaaggtccttgttttcttcgttgctacaattttcgtagcatggcaatgccatgcgtacgatatgttccctctccgaatgaacactggctatggtgcccgtactccggagtgaaatgcgcaagttggaggcttgctgtggaagcacacaacatctttggctttgagaccattcctgcagagtgcgttgaagcaacaaaggaatacatccatggcgaacaatatagatcagactccaaaa

SEQ ID NO: 12302 - DNA, 265 bp, Glycine max
  Clone ID: 701065603H1
cgcaacaaaaagaaagaatcccaggcgaggagaaagatggaggggaaggagcaggatgtgtcgttgggagcgaacaagttccccgagagacagccgattgggacggcggcgcagagccaagacgacggcaaggactccaggagccggcgccggcgccgctggttgacccgacggagtttacgtcatggtcgttttacagagcagggatagcagagcttgtggccacttttctgtttctctacatcaccgtcttaaccgttatggg

SEQ ID NO: 12303 - DNA, 264 bp, Glycine max
  Clone ID: 701065604H1
cgaaatcctcgcctccctcgcatgatgttcctgagtttcaacatgattagcggcggcaacacactccaaaggtttgaccctgtcgcttgcgcttcttctgtccctcctctcctcgcacccaccacacgacctacttccattttccttccccttttctctccaaacccaaacccacttacctcttcacttctttttcttcttcttcttcttcttcttcttcctttttctcttccaccacgccaccgcgatccaccatgctgcacc

SEQ ID NO: 12304 - DNA, 262 bp, Glycine max
  Clone ID: 701065605H1
gtgaggtagaacccttccactgtggtgactctgcgatgggtgcctacaagtatgtctcagagctatggcgcaagacgcagtctgatgtcatgcgcttcttgcagcgggtgacgtgctgggagtataggcagcaacttccattgttcgtttgacaaggtctacccgccctgacaaggctcgtcgcttgggcttcaaggctaagcagggctatgtgatttaccgtgttcgtgttaggaggggtggccgaaagagaccagttccc

SEQ ID NO: 12305 - DNA, 263 bp, Glycine max
  Clone ID: 701065606H1
ctccgagatcaaccctgacccctaaggccaggggtttttctcggcttcttcagattcctgaaatggcgtctgtttcagctttagccaagtacaagctcgtcttcactgggtgaccaatccgtgggcaaaaccagcacatcactcgcttcatgtacgataaattcgataacacctatcaggctacaattggtattgattttctatcaaaaactatgtatctcgaagatcgaactgttcgactgcagttgtgggatacagctggc

SEQ ID NO: 12306 - DNA, 262 bp, Glycine max
  Clone ID: 701065607H1
caaagcataaagtatggcttcgacggcagcgtaccttgctcggcgcgcggccagaaggagagggttcggatcctctaccgccgcgccctcaaagacactctcaactgggccgtacatcgccacctcttctacgagacgcttcaaacctccgcgaaaggttcgaggagaacagacacgtggaagaccctgataccattgacaggctcataacggatgctgaagcttcctacaacaagtggcgccatcccgatccctatattgt

SEQ ID NO: 12307 - DNA, 205 bp, Glycine max
  Clone ID: 701065608H1
cagatagaaggagcagcagctatagatggcagaggaccaagtatatcggacacctatactaaacagcaaccacggaagatttgggatcatagtgatggaagtctagcaattgatttttatcaccggtacaagagcacataaagatggtgaaagaagttgggttggattcatacagattttccatctcatggtccagaatattccc

SEQ ID NO: 12308 - DNA, 262 bp, Glycine max
  Clone ID: 701065609H1
cagagagtggtttcagtgagtgatcggtgttcacttgatccttcataagtcgtcatcatcatcatcatcatcaccgttgattgaagaagatgccgatcagaaacatcgccatcggaaggcctgaagaggctactcccccgacacgttgaaggcggggttggctgagttcatctccaccttgatcttcgtgttcgccggttcaggttccggcatcgcctacaacaagctcaccgacaacggcgccgccactcccgccggcctc

SEQ ID NO: 12309 - DNA, 259 bp, Glycine max
  Clone ID: 701065610H1
ctacttcaaccttgctttcttttctgctcaacatggctgacgattatctccaagaagagaagaagcgagttcggaacccttttgtccccattggtgcacttgttactgctggtgtgctaacggctggcttaatcgttttagacccggtaattctcagttaggccagaagttaatgagggctcgtgtggttgtccaaggtgcaacagtggcgctcatggttggcactgccttttattatggagaaaatccttggcgatcg

SEQ ID NO: 12310 - DNA, 257 bp, Glycine max
  Clone ID: 701065611H1
gcttttcactgagtttttttttttttattatttatttcaacagaggaaacgcgatctagaacttgccaaacggtgttggaatttgtgatctggtgaatcatgaatgctaggagagatggtcgtaacaacagagtgctctttttgatggtattgaggagggtggcatcagagcatcgtctctttactcctcaacttcttcccatgaaattgatgaacatgataatgaacaagcattggatggattgcaagatagagtt

SEQ ID NO: 12311 - DNA, 254 bp, Glycine max
  Clone ID: 701065612H1
cttatattcaaggttgcactgaaagtacccgtagtagttcgtctggaaggcaccaatgttgatcatggaaaaagaattttgaaggaaagtggtatggcgttgataacggctgaagatttagatgatgctgctcgaaagcagtgaaagctgcttacaaatgaagggttacttctgctcaaatttaaaattcagtttagttgcaacattatttttggtgttaaaacatattttcacgagaaagggattgatgcgag

SEQ ID NO: 12312 - DNA, 258 bp, Glycine max
  Clone ID: 701065613H1
gatcgagataactagaaacagtgtgatgaaaatgcaggtccttgttttcttcgttgctacaattttcgtagcatggcaatgccatgcgtacgatatgttccctctccgaatgaacactggctatggtgcccgtctccggaggtgaaatgcgcaagttggaggcttgctgtggaagcacacaacatctttggctttgagaccattcctgaagcgtgcgttgaagcaacaaaggaatacatccatggcgaacaatataga

SEQ ID NO: 12313 - DNA, 259 bp, Glycine max
  Clone ID: 701065614H1
cttcaacctctcatcattaggcattcagcaagcaagacaaaaaaatgggcaaaatcatgcttgttttgggtagcctcattggattatgctgtttcacaatcactacctatgccttctcaccttctggatggaccatgcccatgccactttttatgggggtagtgatgcttcaggaactatggggggagcttgtgggtatgggaatctgtatgccactgggtatggaactagaactgcagctttaagcactgccttattt

SEQ ID NO: 12314 - DNA, 262 bp, Glycine max
  Clone ID: 701065615H1
cgacagtgctcctaaacgacgccgtttcgcaagcatcagtagtgtagtcgcagagaatcaaatcaatggagaagggaaagggagtgatgggatcgggaggacgaagatggggcgttgacttctccgacaattccattctcgcgatattcccgatcctcccggtttctgtcgcacttctctcgatcaggacgattcaacgctcagtcgccagaagaaggacgctgaatccaactggaaagcccagaaagcttgggaggtagca

SEQ ID NO: 12315 - DNA, 273 bp, Glycine max
  Clone ID: 701065616H1
ttctggcggcgcggcgatggaggaggcaagtggtccttcttgtcatggtacttggctcttcctggaaaataccctgttgccgtgaaagctctaacatcttcaattttgaatctaattggagatttgatttgtcagcttgtgatagacaagtgccgtcactggatttcaagaggacatttgtctttacttttcttggttttgctttagtgggtccaacactgcatttctggtatttgtatctgagtaaattggttacacttcctggagcatcag

SEQ ID NO: 12316 - DNA, 278 bp, Glycine max
  Clone ID: 701065617H1
cggctcgagctgaagaacaagaagaagagtactatggcgatgatagacttgtgatcatgattcaatcattggaggcagagatcactgacactgaaatgggtcaaatgtatgagatgggacacgtggatgatcaagatcgctccgcgtagtcggtgtccctgatcattgggttgacttggaattgatctcttccttgccctttgatgagatgaatgcatggatcccttatggatatgggatgatggaacatgtagaaatggaatatgaagctggaaatg

SEQ ID NO: 12317 - DNA, 263 bp, Glycine max
  Clone ID: 701065618H1
ctgagagctcgcaatagtagccatagccataatttattgttattatttagggatgagtgctgtgaatgaatgctaactaaaacaccgccatcgctcttgtctctcacggttgactctgcggttcttaatctctccgaatctccgatctctcccatgtccctgatcacatcctcctcgacctcttcctgagaatattgaaggctgggaagctgactgagaaagtccctctccttttatagcaactggtaaggatgaagtcctct

SEQ ID NO: 12318 - DNA, 263 bp, Glycine max
  Clone ID: 701065619H1
ttttgcaagtcaatacttgctaccagagctggctggtatagcaaaaatgttctccagtgaaatgactttggcctctgcctggattcacctgttggttgttgatctttttgctgcaaggcatattttccaagatggctgaagaatcagattgaaactcggcattctgtttctttttgcttgtttttttgccccattgggattcttactcatgtcgtcaccaaatccatgaccaaacctgccagaaaggagggtcatggtttata

SEQ ID NO: 12319 - DNA, 260 bp, Glycine max
  Clone ID: 701065620H1
ctttcttctctctcaacaacttcaccttcctcctcctcgatcatgtctcacttcaacggcaagtaccatgatgagcttatcgccaatgctgcgtacattggcactcctggaaagggtactcttgctgctgatgagcaacagggacaattggcaagcgtttggccagcatcagtgtagagaaccttgaatccaacaggcgagctcttagggagctgcttttcactgctcctggtgttcttcaatatctcagtggtgtcatc

SEQ ID NO: 12320 - DNA, 260 bp, Glycine max
  Clone ID: 701065621H1
aagaaggctggcattgttggaaaatacggtacccgttatggtgccagtctgcgcaagagattaagaagatggaagttagtcagcacagccaatttttctgtgaattttgtgggaagtatgctgtgaagaggaaactgtaggaatatggggatgcaaggactgtggtaaagtgaaagcaggcggtgcttatactttgaataccgcaagtgctgtgacggtacggagcaccatcaggaggttgagggagcaaactgagagtt

SEQ ID NO: 12321 - DNA, 262 bp, Glycine max
  Clone ID: 701065623H1
caatctcaagcattgcatccctcttgatttgtagtttgttttgtgttttagataaaagttctgccaaatcaagaggggttttaagatcatagtgtgtgttttgcaacaatggctaagttctttgctgctatgatctggcactctttgccatttccatacttcaaacagtggtaatggctgctaatgaacaaggaggccacttgtatgacaacaagagcaaatatggaagtggaagtgtcaagagttaccaatgcccatcaca

SEQ ID NO: 12322 - DNA, 262 bp, Glycine max
  Clone ID: 701065625H1
cctcgagccgattcggctcgagaaacgtgaaccagaaccagaatggctcttcaacaacgaccactgaaacttcactttattccttacctgtcaccggggcatgtgatccctctctgcggcattgcaacactcttccctcacgcgggcagcacgtgacggtgatcaccactccctactacgcccaaatcctccgcaagtcaagcccctccctccaactccacgtcgttgactttcccgccaaagatgtgggccttcccgacgg

SEQ ID NO: 12323 - DNA, 255 bp, Glycine max
  Clone ID: 701065626H1
cccagaactaggacaggttattcaacttcaaggtgatcagaggaagaatgtttctaccttcctagtccaggctggtatcgtgaagaaggatcatatcaagattcatggtttctgagcggttggagtcttaagttcaaattttacctgcctgactatgtgttaggcataatatataatctgagtcgtgtggatgtgattgtggtatttctaatgtgttcttatgttttaccatgtgatgtgggattatggatttca

SEQ ID NO: 12324 - DNA, 257 bp, Glycine max
  Clone ID: 701065627H1
gattaaccaggtgttgccaattggagggcctgggaaggcattgactccattggaacaaggggagatgctgtttaggcttttggggaaggagcctaagttcttgaaagttccaatcgggatcatggatttcgccttggggttcttgactttttggttaaggtctttccttcactggaagatgctgctgagtttgggaagattggaaggtactatgcggcggacagtatgttgcttctggatcccgagaccggagaata

SEQ ID NO: 12325 - DNA, 258 bp, Glycine max
  Clone ID: 701065628H1
ggaattttgtttggttgtgaagacatacattacatgtattcaaaggctgctattataattacgattatgacgataacaaaagctttctatccttgtcgcgtgtgcattggtctcagggctgcaacatgcatatctacacatgtgcttagttttgagtgaatgattttttcatttattaatatcaaagttttattattgtagctcactctaccaaatatttggagcatatgggattcttacatcttatataaagcattt

SEQ ID NO: 12326 - DNA, 249 bp, Glycine max
  unsure at all n locations
  Clone ID: 701065629H1
gccgtagcagcagcggaagctctagcttgggcagcgaatcacaatggcgagaggattgaagaagcatttgaagaggcttaatgccccaaagcattggatgcttgacaaactgggtggtgcatttgctcctaagcctcatctggaccacacaaatccagggagtgnctgccactcatactcattttgcgaaaccggctgaagtatgctctgacataccgtgaagtcattgctattctgatgcagcgacat

SEQ ID NO: 12327 - DNA, 261 bp, Glycine max
  Clone ID: 701065630H1
gtttgttgtgagctataagctagtttatcgtgaggcgaatatgaagttgtttgttttctttgttgctgcagtagttttggtagcatggccatgccatggcgcaggctaccaaaggttccctctccgaatgaaaatggctatggtgagcgttcttcggaggtaaaatgcgcaagttttaggcttgctgtggaagcacacaacatccgagccattaaaaccattcctgaagagtgcgttgaacccacaaaggactacattaat

SEQ ID NO: 12328 - DNA, 262 bp, Glycine max
  Clone ID: 701065631H1
cttagagtgaatccatgaccgtgaccatggcggctgcgtttacaagtacaagtgcaacactgagactgtcaaatgttggagagagcagaggtttgcagctgcgtaagtgtaaccctaatcctaataagctgaaggtatgggggggtttggaggttgttctggagtggcagtgggtgtgagagaaagaaaaggaattggaagggttagggttcgggttcgggcgagttcttcgtcggacgaggcagtgagtgcgcagtcaaaa

SEQ ID NO: 12329 - DNA, 263 bp, Glycine max
  Clone ID: 701065632H1
tccattgtgctgtgttgtgttgcaaacaaagaggagaaaaatatgagttactctgaaccgtgtttggctggcggcgacggtggcggtggcgcagggccacaccgatcccggccacaagtgcaagacggcgctcacctcatccaccacaaccggagccgcctcttctccggcggaccctgtcagatctccggcctctttccggcgtcgtgggatctgacgtggccggctcggtggcggggagctccgacgtggagaatagggtg

SEQ ID NO: 12330 - DNA, 267 bp, Glycine max
  Clone ID: 701065633H1
ctagctgcaaagctttttgtgttctgcaactgaaagtgaaggaaacgaagcagaaaccaaatcatgtgttctctactttggagttccattgcattgtgtgtaacctttcctactccttgagcttggcgttgtgcaccctcaccctcacaccataggatccctcgcttgccgggtcaaccccatgttcagtttcatcagttttcaggttatgtaaccgttgatgacaaaaaccagcgtgcactttttttctactttgctgaagccgaa

SEQ ID NO: 12331 - DNA, 263 bp, Glycine max
  Clone ID: 701065634H1
ctcgagccgctcttagtcccaattttctagggttttattcattttccgatggcttctgcagacgttgagtaccgttgctttgtcggtgggctcgcttgggccactgacgaccatgccctcgagagagccttctgcagtacggcgaaatcgttgaaacgaagattatcaacgatcgtgagactggcagatccaggggttctggatttgtgaccttcgcctcggtgccgtccatgaaagatgcgaccggagcgatgaatggacag

SEQ ID NO: 12332 - DNA, 256 bp, Glycine max
  Clone ID: 701065636H1
ttggaacttaagtgaagtgatgcgcggcaacatttgggaaacaaaatggttgacagtgagcataaccctaacactcaccgccgtttccatctctgcgtacgtaataaaagagaaaatggaatcatctgaactcaaaattgaggagcttgtggcatctctcaagtctttctcagacaattgcttctccgaaagacagcgccgaattagagctcaacaggccttgagaaaagaagtaacacagtcgcaacctaattct

SEQ ID NO: 12333 - DNA, 258 bp, Glycine max
  Clone ID: 701065637H1
caaaaataagacattgtttggtttggttacttgctcgaatttcctcgaatctcttaatttgtatgtgattagttaaaccgcaacgcgcaatctcttttctcgaactggctaactctcaggcaagtcgttcggcgctgattccagcatcaagcggctgctgctcgcactgtatgacgctctaaactccggcgactccgacgccgtcgtcaagatcgtcgccgccgacctcgagtggtggttccatggtccgccctcaca

SEQ ID NO: 12334 - DNA, 258 bp, Glycine max
  Clone ID: 701065638H1
agaggttggtgtgaagtggaagaggaccttctgtgcatcataccaaagaaattgagtgacattatgcattgaaagtatcaagtaacaaagcaagcaggttgaggaggttaccagtatatcctaaagtatagacttcaattagttgttccttcagtctctctagagctgcgagatggggttgctaagagatgtaaagcatccacttctcattcagcatcaatttactggatgggcgataacgcattgcaaagttctcta

SEQ ID NO: 12335 - DNA, 260 bp, Glycine max
  Clone ID: 701065639H1
ccactgtttcgattcaagatctcaatcacatcactccaagatcctctctctttctctcttccaaaccctaggctccaccactccgtgatccatgcttcttccccacttcgatgctgagtttcttcttgggagtccttagcgtagagaggcagagcgaaaccaagaaaatgctcagtttcgtcttcatcattgcgtccttattcctctccctctgccacggccacgtctacaccttcacgatgcaccaccgccactcggag

SEQ ID NO: 12336 - DNA, 258 bp, Glycine max
  Clone ID: 701065641H1
caaggagatggctctgggaagaggcagtgcagtggttctactactttgcttcttgctgcttcactctcagatggctcgtgctgccacctacacagttggagattctgggggttggacctttaacactgttgctggcccaaaggaaagctctttcgggctggtgacacacttgctttcaattatagccctgggactcacaatgtggtggccgtgaacaaggctggatatgatagctgcaagactccaagaggagccaaa

SEQ ID NO: 12337 - DNA, 256 bp, Glycine max
  Clone ID: 701065642H1
cgttggtaggatcatcatctctttgagttgccattgaagaagaagctcagatcggaaaaattcacctctccaatcccaatcccatcgttgcaaatgatccgattcattctgttgcagaacaggcagggcaaacccgtcttgccaaatactacgttcctctcgaggactccgagaagcacaaggtcgaatacgaggttcatcggctcgtcgtaaacagagaccctaaatacacaaatttcgtcgagtttcgtacgca

SEQ ID NO: 12338 - DNA, 260 bp, Glycine max
  Clone ID: 701065643H1
gagcttggttgggaaaacgatgatgtgtcgtaggacggagttatatagagagctgaagcagcgtataacacattttcgacatttctgcgacacgcatcaaaaacatcttcaagatctcgaattgctcaagtgcttaaatccgagattcaattcgagcttgcctccaatcactttcagaatgctcaaagtggttccttaggggactttgtggtggaccccacctcacccaattccaaagatgtggttttgcgaagaaaatt

SEQ ID NO: 12339 - DNA, 257 bp, Glycine max
  Clone ID: 701065646H1
ccgaaggactttaggttgggatttgggaattagggttattcgcgtggcgaagatgattgacgtggttttgaacgatcgattggggaagaaggtgcgcgtgaagtgcaacaccgatgataccatcggcgaccgcagaagcttgtcgcggctcagactggcacaagagccgacaagatccgcatccagaagtggtacaccatctacaaggatcacatcactctcaaggattacgagatccatgacggcatgggtctcga

SEQ ID NO: 12340 - DNA, 257 bp, Glycine max
  Clone ID: 701065647H1
cagaaattaagctcattgagaaacataaactatcttgacaaaatgaaacaagttttcgtagcattcttagctctgcaagttgtgttagtccttacaattatggctgcagatccagcagggaagggctacgatttgaaaaggcaaaaaggtcactaaagtcttgcatggaatacctcactggtaatgttgatagcccttcagctgcatgttgcaatggtgtcaaggaattgaaagcatcagcaccaacaaaagatgaa

SEQ ID NO: 12341 - DNA, 262 bp, Glycine max
  Clone ID: 701065648H1
ctactcctcgcaacgtggaacagacctcttccacaacacacttgaaatgacgacatgggtctcttcctcgaagaggctgagaaggtgaaggctgccatggggtccctccgtgacatcctcggccgcctccagcagccaacgaggagagcaagtccttgcacaagcccgaggccctcaaggtgctccgggcacggatcaatgcggacattgtcgctgtgctcaagacggcccgggcgatccgggcccagctagaggagatgga

SEQ ID NO: 12342 - DNA, 264 bp, Glycine max
  Clone ID: 701065649H1
ctccttcttcatagcttcacacgtggagtggactgaatagttccaccagtgccgctgcatcaatgaacgaccagctctccaaccccacctccatcttcggcctccgcctatgggtggttctcggcgtctgcgttgcgccgccatcgtcctcatcctcttcctcatctccgtctggttagccttcaagcgctcccaaaccaaccccgtttccatccccgacgtctccaaggagatccaagatatcaggctcgaccacgcgcccaa

SEQ ID NO: 12343 - DNA, 263 bp, Glycine max
  Clone ID: 701065650H1
ccagatgcagatattcgtgaaacccctaaccgggaagaccatcacccttgacgtggagtcaagcgacaccattgacaatgtcaaagccaagattcaggacaaagaagggattcctccggatcagcagaggttgacttcgccggtaaacagctggaagatggccgtaccctcgctgattataacatccaaaaagagtcaacattgcatcttgttttaaggcttcgtggtggtattattgagccatctttgatggcactggcgag

SEQ ID NO: 12344 - DNA, 261 bp, Glycine max
  Clone ID: 701065651H1
catggtgggatttgctcctttgacatctcgtggctctcagcaatacagagccttgagtgttccagagctcacccagcaaatgtgggattccaagaacatgatgtgtgctgctgaccctcgacacggccgctactcactgcctcagccatgtttagaggaacgatgagcaccaaggaggtcgatgaacaaatgatcaatgtgcagaacaagaactcctcatactttgtggaatggattccccacaatgtgaaatccacagtc

SEQ ID NO: 12345 - DNA, 259 bp, Glycine max
  Clone ID: 701065654H1
ctcgagccgctcgagccgaggaaacgttgtggtgtgatgcgagacagagatggccggtacctaccataacgcccagcggcacgtgctacagctggtgatgtcgtgccggaaaatcaccgcccaggtcacaaaaccaccacatcctccatcatagccatggcttcatcatcggagcaggaattcgtggctcactaccgcgctcagcttaatcgcttccccagatcgcaccgcttctgggacgctaaagtggcctctcgcg

SEQ ID NO: 12346 - DNA, 260 bp, Glycine max
  Clone ID: 701065655H1
ctcgagccgtcagaaccaaactcgccaaaactagggttttgctgtgatggcactgtgcaacagcgtcagatcgggaatctctctcttcaccaaatccacgttccttacttcccagcgatccagtctccaacgaccctcgttgcccctttcatttccctcgcctccagaaattacgccaacgtgccggggcaaaaggaaaccaaagttaaggtccctctggctttgtttggaggttcaggaaactatgcctctgctttgta

SEQ ID NO: 12347 - DNA, 260 bp, Glycine max
  Clone ID: 701065656H1
cagatagaaggagcagcagctatagatggcagaggaccaagtatatgggacacctatactaaacagcaaccagggaagatttgggatcatagtgatggaagtctagcaattgatttttatcaccggtacaagacgacataaagatggtgacagaagtcgggttggattcatacagattttccatctcatggtccagaatattccccaagggcaagggagcagttaacaccttgggggtcaagttctacaacgatctcatt

SEQ ID NO: 12348 - DNA, 256 bp, Glycine max
  Clone ID: 701065657H1
ccaataagagctcaaggccttcatgatcaaatcaaggtttcaacatctattgacatgaccctaataggaaactctttccctccatcgcaaggttccttcaggggtgatgtgagatcatacctagatcccatattgggtacttggtatatgcaaatgcaccattactagtcaatgtgtacccttattttagttacactggtaacccccgtgacatatcacttccctatgctcttttcacagcaccaaatgttgtggt

SEQ ID NO: 12349 - DNA, 255 bp, Glycine max
  Clone ID: 701065658H1
ggccaccgttccagggcagctcgtgtgggagatcgtgaagaaaaacaactcctttttggtcaagcagttcggaagggggacccagagcgtcgaattcagcagagagagcaacaatctctacaacctcaatcgttcaagtactctggtttggcaaacaagaaaactgttacggtacagcctgagggtaaagatcaggctgtgttgttggctacaacaaagacaaagaagcaaaacaagcctgctgcattgcttcac

SEQ ID NO: 12350 - DNA, 255 bp, Glycine max
  Clone ID: 701065659H1
ctggtctcttctcttctcgcaagccgagcccaatttctccttcacgaaccctaattcactcttcccattcgaaatctcgatcaccttttcgattcaacctttctctcctcgctaatctcttcgctcgcctgcacatcaaggtgagggattgaaattgaatcctcaagatgccagctacagcaggaagggttcgcatgcctgcgaacaatagggttcacagcagtgcagcgcttcaaacccatggtatatggcaaa

SEQ ID NO: 12351 - DNA, 257 bp, Glycine max
  Clone ID: 701065661H1
cgcactgtggcagaagtcctaggagtgtaaaacagagacgcaaaatgaagacgatcttgtcgtctgagaccatgaatattcccgacggcgtgagcatcaaggttcacgctaaggttatcgaggttgagggcctcgtggaaaactcgtgcgagacttccaccatctgaacttggacttccaacttattaccgacgatcgcggtaaaaggaagctcaagattgattcttggtttggttctcgtaaaacctccgccgcca

SEQ ID NO: 12352 - DNA, 260 bp, Glycine max
  Clone ID: 701065662H1
ccaatgagttattacaaccagcagcaaccgccggtcggagttccgccgccgcaaggttatccgccggaggggtacggaaaggagggatatccaccgccgggatacccgccagcgggatacccgccagccggatcccaccgccgggatatccgccacaacaaggctatcctccgccgccctacccggcgcaggggtatcctccgccctacgctcctcaatacgctcagcctccgccccgtcaacaaaattcaactggccct

SEQ ID NO: 12353 - DNA, 260 bp, Glycine max
  Clone ID: 701065663H1
cagaaatataagaggtcattgagttaccaatcaaacatcctgagctgtttgacagtcttggaattgcacaaccacagggtgtcctgctctatgggccacctggtacaggaaaaacattgttggctagggcagtgctcatcatactgactgtacattcatcagggtgtctggttctgaattagttcagaaatacattggagaaggttctagaatggtcagggaactttttgttatggccagggaacatgctccatcaatta

SEQ ID NO: 12354 - DNA, 257 bp, Glycine max
  Clone ID: 701065664H1
tgctgttttttgttctttcttgatgaaggtaggctttaatggattaaggggtaaagaaatttcgcttatttccattgttctcatgtctgtaactatcattttatggtcatgggagtaacatcctggtcttaggcctttcttcctcctcaaacaccaccactgcaactgccttcagatcatttagctagtcgtcgttcagaccaggtgctagaaccagatccacatttgggtgaagatggctcgccgttggcaaaggc

SEQ ID NO: 12355 - DNA, 97 bp, Glycine max
  Clone ID: 701065665H1
tcggctcgagcgcagatagagtcatacaagctgcattatgatacatgtttatcgggtttcttaactacgtttaaacattgtagctatatattgtgag

SEQ ID NO: 12356 - DNA, 259 bp, Glycine max
  Clone ID: 701065667H1
gtttgttgtgagctataagctagtttatcgtgaggcgaatatgaagttgtttgtcttctttgttgctgcagtagttttggtagcatggccatgccatggcgcaggctaccaaaggttccctctccgaatgcaactggctatggtgagcgttcttcggaggtaaaatgcgcaagttttaggcttgctgtggaagcacacaacatccgagtccttaaaaccattcctgaagagtgcgttgaaccaacccaggactacatta

SEQ ID NO: 12357 - DNA, 257 bp, Glycine max
  Clone ID: 701065668H1
caatctcatctcattcatttcaatggcaactcaaggtcaagtcattacctgcaaagctgcggtggcctgggaacccaacaagcccttaactgtccaagacgctcaggtggctccgcctcaggccggcgaggccgtgtccaaatcctcttcaccgctctctgccacaccgatgcttacatctagggcggcaaggatcccgaaggtctcttcccctgtattcttggccatgaagctgcagggattgtggagagtgttgg

SEQ ID NO: 12358 - DNA, 256 bp, Glycine max
  Clone ID: 701065670H1
gtagtagccatggggactttcaatcactatgtgattgttaagttcaaagatggtgtggcagttgatgatctcattcaagggttggagaagatggtctttgggattgaccatgtcaaatcctttgaatgggaaaggacattgaaagtcatgatatgctaagacaaggtttcactcatgctttcttgatgacattcaatgggaaagaggagttcaacgcatttcagactcacccaaatcatcttgagttctcgggagt

SEQ ID NO: 12359 - DNA, 259 bp, Glycine max
  Clone ID: 701065671H1
cctcgagccgaatcggctcgagttattacattagaggaatgtaacatacgaagaggttgcggatagccgaggatcctccatccaaaagctcaaaggacaagacgtccaatggacctgattctggcaaagtcaacttgtatttaaaattaccagtagagttccttataaaaccgttctgaaagcacacagtgctgttgttttgaaggctgaaagtgcagctgataagattgaatggattaaaaagataagtcaagttata

SEQ ID NO: 12360 - DNA, 257 bp, Glycine max
  Clone ID: 701065672H1
ctacaaccttagctcttcctctgggttgaagaaacttgatgagtaacttctcccacgcagttacatcaccgggtaccaagctacaaaggatgatcttactgtttatgcagctttgccaactgctccatcaatgaatatggaaatgtttccaggtggtacaagcacattgatgctttgttgagaatctctggtgttactggcgagggatctggtgttattgttgagggatctctagttgcagagcctgttgcaactcc

SEQ ID NO: 12361 - DNA, 256 bp, Glycine max
  Clone ID: 701065673H1
ctttagccgaggtcaggaggagcactagctaagttcacaatttcaacatggctaggggactaaagaagcatttgaaaaggctcaatgctcctaagcattggatgcttgacaaactgggtggtgcatttgccctaaaccctcatctggaccacacaaatcgagggagtgcctccccctcattcttattctgcgaaaccggctgaagtatgctctgacataccgtgaagtcattgctattctgatgcagcgccatgtt

SEQ ID NO: 12362 - DNA, 251 bp, Glycine max
  Clone ID: 701065674H1
cttcagtgatctacatggaaatttgatggagagggatgttatgaaaataccatccgtatgctgcatttgtgtattcatctagtgcagtaggaaatccaaaatacattggacggttatgcattcgtataatagtcaagcttgtcatcagtttaatgaaaatgtggattttgcattcgtccttggtacaagtaatctttgtagtgcagcgctgcagcagtaataccaaccaaaatacactggacggttgtgta

SEQ ID NO: 12363 - DNA, 254 bp, Glycine max
  Clone ID: 701065675H1
ccctcattgaccttacagttatagacatcttgtcaaggcacgcatctgatgagttctaccttgggcagagagatggtggtgactactggacttctgatgccggtccattagaggcatttaagaggtttgaaagaagcttgaagagattgacaagaagcttatagagaagaacaaagatgagacattgagaaaccgctatgggccagctaaaatgccttacactctgctctatccttctagtgaggagggattga

SEQ ID NO: 12364 - DNA, 255 bp, Glycine max
  Clone ID: 701065676H1
tagctggcattggcgttgtgtaacattgttgctcttcctctctcaaacttgaaaccttctctagagtgatctgcttcttcatcctcttgttgtatcaccagactcttccccatttcccgcatcaatgtctctccacctcggtattagttcgagcctcttcctcatcctctttcgggtctcgcctcgaagacaccatcaagaagaccgtagctgagaacccagtcgtcgtttattccaaaacctggtgcacctatt

SEQ ID NO: 12365 - DNA, 243 bp, Glycine max
  Clone ID: 701065677H1
ctgttcgagtgaaggttgaaaagcctcatctggcagttcaaggtccacttgattacttaggcgttgagatacttagacgcagaagcgatttgtcagaatagaaatttcatagttttgttctctctggttttgttgctctcattctgatttgtattgcttgttttcattgaatgtttcttcttgccattcagtttgatacatcgtcaagttccatttgatataaaggtaactctttccctgagt

SEQ ID NO: 12366 - DNA, 256 bp, Glycine max
  Clone ID: 701065678H1
gctcgtgcctctagggttatcatatctccatttccatttcctctctctcagtttccaagaatcttaagctatgggaaagtcttacccaaccgtgagcgctgattaccagaaggccgttgagaaggcgaagagaagctcagaggcttcatcgctgagaagagatgcgctcctctaatgctccgttttggcatggcactctgctggaacttacgacgtgagctcgaagaccggtggtcccttcggaaccataaagcac

SEQ ID NO: 12367 - DNA, 257 bp, Glycine max
  Clone ID: 701065679H1
cggttttccaattcacagagcaacacaacgaaccaacaatggcgcacctcagccgcagtcgcagccgcagcacgggcaagcagcgctggagcaggtgcagtgcttcggtcgcaagaagaccgccgtggccggacctactgcaagcgcgggcgcggtctcatcaagatcaacggctgccccattgagctcgtggagccggagatcctccgcttcaaggccttcgagcctatcctcctgttgggtaagagccgcttcgc

SEQ ID NO: 12368 - DNA, 262 bp, Glycine max
  Clone ID: 701065681H1
ctagtttatcgtgaggcgaatatgaagttgtttgtcttctttgttgctgcagtagtcttggtagcatggccatgccatggcgcaggctaccaaaggttccctctccgaatgaaaactggctatggtgagcgtcttcggaggtaaaatgcgcaagttttaggcttgctgtggaagcacacaacatccgagactttaaaaccattcctgacgagtgcgttgaaccaacaaaggactacattaatggcgaacaatttagatcaga

SEQ ID NO: 12369 - DNA, 260 bp, Glycine max
  Clone ID: 701065682H1
ctgactttcaagcgcaggaatggaggtcgcaacaaacacggccgcggccacgtcaagttcattcgatgctccaactgcggcaaatgctgccctaaggacaaggctatcaagaggtttctggtgaggaacattttgaacaggctgcagtcagagatgtgcaggaggcttgtgtctacgaacaatacacgcttccgaagctgtatgtgaagatgcagtattgtgtttcctgtgctatccactctcatgttgtgagggttcga

SEQ ID NO: 12370 - DNA, 257 bp, Glycine max
  Clone ID: 701065685H1
gtccaggtgatcttaataaatggtaccgtcacatttcaaaaggtgcttggcctttttcaactggagatcatggatggccaatttctgactgcacagctgaaggactgacagctgttctattactatccaaattgcaccagaaatagttggtgagccaatagacgtgaagcgattatatgattctgtaaatgtcattctctcactacagaatgaagatggtggttttgcaacatatgagcctaaacgatcttataatt

SEQ ID NO: 12371 - DNA, 270 bp, Glycine max
  Clone ID: 701065686H1
cgcgcttatgggccccaagctttctcttggcaactttcagtgccctcttatcttttccaaccttgagcaactcagttattcgcttttcataaggtgcaaagaagaagagagaggagatgtccaatgttctccggaagatgaggctggtggagctggagacaagaagaaataagtcttgtttactttttctagtttcactagactgtttcgatgtacgagttgtcttatttttgttttagttcaagattttgctttgagaaatatgtttta

SEQ ID NO: 12372 - DNA, 258 bp, Glycine max
  Clone ID: 701065688H1
cttcaactctgcttcccctggcaaccttcttcttagttctctccgcctcttatctccagattgctggggcgaaagcacaaccgttgactagtctcaagcttaactctccgatccttcaggagtctattgctaagagatcaatgaaaatcctgaggcaggatgggaggctgctataaatcctcatttctccaattatacagttgaacaatttaagcgccttcttggagtcaaaccaacgcctaagaaggaactgagaag

SEQ ID NO: 12373 - DNA, 254 bp, Glycine max
  Clone ID: 701065689H1
cgtttcttcagtttggtataaccttagccgaggtcacgaggagcactagctagtttcacaatttccaaatggctaggggattgaagaagcatctcaagaggctcaatgctcctaagcattggatgcttacaaactgggtggtgcatttgcgcccacaccctcatctggaccacacaaatctagggagtgccttcccctcatactcatcctacgaaaccggctaaagtatgctctgacttaccgtgaagtcatcg

SEQ ID NO: 12374 - DNA, 253 bp, Glycine max
  Clone ID: 701065690H1
ctgcaatctaatgggagccacattgttgatgggaactggagggccctagggaagcttcttatatactgttcaggatgcacaaaaggtggcttgttcaatagcattcagattcctggtcactttgtttacagacacgattttctagaacatcaggaaagagctttcttttgccacaatgcaggactgatgttttgtatgtatgtgatccttgtgagcatcttgaccaaggtgaggcaggagatgtaggattctt

SEQ ID NO: 12375 - DNA, 255 bp, Glycine max
  Clone ID: 701065691H1
cagaagtcctgagaaggcatctagaacaaagctctgaatctgattttgaaaactggaacgcgtaaaatgaacggtacccctccctcataaataaaatctactactaaacgctcttctcttctgcaatcatttgcaaaccaaacacaacacaaggagaagaaccagatctctctttctcaaatcaccaagaatagttgaaaatggggctgtctttcacgaagctgttcagccggctctttgcgaagaaggagatgc

SEQ ID NO: 12376 - DNA, 253 bp, Glycine max
  Clone ID: 701065692H1
tccacgtgccggaattgtcatatcactggcatccatttatgatttggagaagcacaaatctcgtagagtgttatacaaaggttacatttctgagctgtttgtgccataccaagacccaacagatgattttactataagactttctttgatgctggagagtttgggtttggtctctccacggtctcattggtgcccaaccgtgattgcccatcgaatgctcagttcctagatacatatgttcacgctgctgatg

SEQ ID NO: 12377 - DNA, 256 bp, Glycine max
  Clone ID: 701065693H1
ccaagccaagtgaaagtcagacacaataaaaatcaaagagcataatgtcagggatcattcacaagattggcgagacccttcatgtgggagggcacaagaaggaggaggagcataagggtgagcaccatgcggagaatacaaaggggagcaccatggtgaacacagtagtgagtacaaaggagagcatcatggtgaacacaaagctggagagtaccatggtgagcacaagccagagcacccagaggggttcctagac

SEQ ID NO: 12378 - DNA, 256 bp, Glycine max
  Clone ID: 701065694H1
catcggtttgtctcatcattgccggcttctcgccgtgcaagtgctgatttcactcgtccagtgttcaccgcggttgctttttatttatgtgctaagaaacacaagcttaaagtagataaacttaagttaatgagctctgtggtacatctgagtctgagttttctagtgtttctgctactatgaaggatttgtgccatgatgtttttggggttgcgaaggaaaagaaggatcctaaggaagtgcagtcaaatcgaga

SEQ ID NO: 12379 - DNA, 195 bp, Glycine max
  Clone ID: 701065695H1
ttgtaaccttcgtttcgagtcttcacctcgcagataatcggagaaacaaaggacgaagcatacgaggaaggcttctcgattacgaggaggaagacgaaaaggcccccgactccgccggagctaaagtcaacggcgaactaccaagaagggctatgttggaattcacagttcgggattcagggacttccttctgaa

SEQ ID NO: 12380 - DNA, 293 bp, Glycine max
  Clone ID: 701065702H1
tggacgcatatcctaattttaactttgttggtcgcctcctaagccctaaaagaaactctctaaagcgtgtaagaagcagttattaattgccgggtctggatcaggggccgaggtaccattaaggatcagctagggaggaaatgatgagaggaaaacctgggtatgagcatctgttggaacctctcaacattctagttgaggcagaattaccagttgaaatagtagatgctcgcctgatgcaggcacgtgaaatacttgaagatttgctcaaaccggtggatgaatctcaggat

SEQ ID NO: 12381 - DNA, 207 bp, Glycine max
  Clone ID: 701065703H1
acatagtgctgctccttgcaactctaattctatcgccttaaggtcttggaaagtatgagaaaaacccaatggaaaaggcttccaattgggaacccacaagtttataagcccccagttgaaaagcctcctgtttacaagccaccagttgaaaagcccccaatttagaagcctccagtagagaagccaccagtgtacaagcaaccagtt

SEQ ID NO: 12382 - DNA, 210 bp, Glycine max
  Clone ID: 701065704H1
tggctcgagggttcacgtttcacaatcactttttgcgactctctcactcactcagtcttcctgctactcctggggttggtttccttcttcgaactcgaacgaggatgcgtgagattcttcacatccagggagggcaatgcgggaaccagatcggagccaagttctgggaggtggtgtgcgcggagcacgggatcgattcaacggggaggt

SEQ ID NO: 12383 - DNA, 281 bp, Glycine max
  Clone ID: 701065705H1
gctttgactttggtggaaactaaagactagtcaaaatggtgaagttcacagctgaagagctggggtggaataatggattataagcataatatccgtaatatgtctgtcattgctcatgttgatcacggaaaatcaaccctgactgattctcttgtggctgctgctggtattattgctcaagaagttgcaggtgatgtccgtatgactgatacccgtgcagctgaagctgagcgtggtattacaatcaagtctacgggtatctcactctactatgaaatgac

SEQ ID NO: 12384 - DNA, 276 bp, Glycine max
  Clone ID: 701065706H1
actcgagccgaatcggctcgaggtgaagagcgaagagaatggctcccaagggtttaatctttactggtacagttatccttctcagtactgtcactgagtcgttgtcttgcgcaggataatggacttgttattaacttctacaaggaatcatgccctcaggctcaagacatcatcaaagaacaagtcaagcttctctacaagcgccacaagaacactgctctctcctggctcagaaacatcttccatgactgtgatgttccgagttgtgatgcttca

SEQ ID NO: 12385 - DNA, 280 bp, Glycine max
  Clone ID: 701065707H1
gcagcggaaaatacctctttgctggagtggttgatggaaggaacatctggggcaattacctttgttgtttccctcactaccttgcagggtcttgaagggcattgtgggcaaagataagcttgttgtgtccacctcctcctcccttcttcacactgctgttgatctagttaacgagaccaagttggatgatgagatcaagtcatggctagcttttgctgcccaaaaaaattgttgaagttaacgcattggctaaagcattgtctggccacaaggatgaggc

SEQ ID NO: 12386 - DNA, 285 bp, Glycine max
  Clone ID: 701065708H1
cggtcgagaaggcccattgaaacaaggtcaagggataaatttgggttccaggaagagaacaaatttgaatcccctaaacttaagcatgttgaacctggactctaaatttactgagaatgtgagcaaaagctcgcttcgaaatggtgtttatggtatgaatgcagtgtatcagaaaaacaatgcaaacttggtgagtaatgtgatcagtaacaagtacaatggtaatattcttcataacaaagagatcaacaacaacaccaacaatgaaagcaacaacacaaatgc

SEQ ID NO: 12387 - DNA, 276 bp, Glycine max
  Clone ID: 701065709H1
agaagaagaaacttaatcgatcatcacttcacttcactaatacatcatggcagacgagaaccaagacaaagtatgagagctctgaggttgaggtccaggatcgtggtgtttttgactttctcggtaagaaaaaggatgaagaagacaagcctcatcctcaggaggaggtcatcgccaccgagtttcaaaaagtcactgtctcagaccaaggagagaacaagcacagcctcttagaaaagcttcaccgatctgacagcagctctagctcttcaagtg

SEQ ID NO: 12388 - DNA, 252 bp, Glycine max
  Clone ID: 701065710H1
ggactgggccagttcagctgccatacactttgctccatcgttcaagtgaggaagggttgactttccaaaggaattcccaacagtatctctatctaattaaaaagagtttgtggtttccttatctatgttgtacttctgaataacatagactttatgcatgtctatgcgtaattattgcctgaacttctgcactattgtatttggatgctctcggttttcatataataaagtgtgttctcactttcactttgt

SEQ ID NO: 12389 - DNA, 273 bp, Glycine max
  Clone ID: 701065711H1
ccctttctctctctctttctccccattctagttttcaaattttcattcatggatgcccaactaataatccctcttctccaagaggctagaggcatctctctttcccttccttctcctccctccaatcaaaatctcaacttttttagacccatttgatctctttcttccatctatttgatctttgcatgtgtcagcactctccacacgagtttcagaacgatggtgaatggagcacagaaaacatagttggatttctttcagcatctccatcat

SEQ ID NO: 12390 - DNA, 272 bp, Glycine max
  Clone ID: 701065712H1
gccatggctgctctgcaatacttggaatcgctgcgcaacgcgcatcctcgagctctccgaatggtaacaattcgctggcggatctataccagaacaagctctggcaccagcttaccctcaagcttgagcagttcgtggctctcgccgtcttccaggccggtgatgcattaatacaattatatcacaatttcatcacagactttgagcccaaaatcaaccttctcaagcttgcgcatttcgctgttatagtttctcggcagtatgctgagaaa

SEQ ID NO: 12391 - DNA, 267 bp, Glycine max
  Clone ID: 701065713H1
gtgatctaaccgaacaatcgcatatttctgttctgccttcttctactcaatacattactcactctagtctcgtttccaggtttgtaataataataattttagtttcttcgttacgcctgcgttgtgcgtgagaaagtgcgcgtggtgaaaaccatggcttctcagctcctgagacgaaccttcggaagtcgcatccttgcaaaccctagggccttctccttctcctccgctgcttccactccgatccgcgccactctcttccccggc

SEQ ID NO: 12392 - DNA, 269 bp, Glycine max
  Clone ID: 701065714H1
gagataactagaaacagtgtgatgaaaatgaaggtccttgttttcttcgttgctacaattttgggtagcatggcaatgccatgcgtacgatatgttccctctccgaatgaacactggctatggtgcccgtactccggaggtgaaatgcgcaagttggaggcttgctgtggaagcacaccacatctttggctttgagaccattcctgacgagtgcgttgaagcaacaaaggaatacatccatggcgaacaatatagatcagactccaaaa

SEQ ID NO: 12393 - DNA, 270 bp, Glycine max
  Clone ID: 701065715H1
agaatatcgtgtagataaaggagcagctccaaagatgttgaactgtcttatgtacaagctgtcttattatcggtttggggagctgacaacagaatatggcaaaccacctgggtatgatcgtgctagaggtgttgaaattggaaataaagacataaagcttgagtacttggaagaggctttcactacacagaattggatagttcgtatttataaagtgaaaccacctaaaaacagatggtaactctaaaaaaacagccccaaaaaacaaag

SEQ ID NO: 12394 - DNA, 270 bp, Glycine max
  Clone ID: 701065716H1
cagaatagtaagtgcacacactcaacaaacctcctgaactacacactcatgtgcaatccaaaagttagtataagtaaataaatactaataatataatacatcatattaatgtatatatttcccaatattaccatcccattaactgagcacgtattcctaacaataattttagagattccattgtatgaaagcatgataaaagatgtataattccattgtagggaatagcaaaacgattggtgagagctgcactagaagaggttgcaaaga

SEQ ID NO: 12395 - DNA, 87 bp, Glycine max
  Clone ID: 701065717H1
cagatttctaggagagaggctcggtttgccagagagattgccatgttaactagagttcaacaccaaaatcctattcaggttaatggg

SEQ ID NO: 12396 - DNA, 295 bp, Glycine max
  Clone ID: 701065718H1
cgttgtcgttcagttctgaacggaaaagcaccgtcgcaccttccctgagggttctcctgtctgtcgcgaattaacaatgttaagggtaaccgtgctgaacgatgctctgaagagcatgtacaatgctgagaaaaggggaaagcgccaagtcatgattcggccatcctccaaagtcattatcaaattccttttggtgatgcagaagcacggatacattggagagtttgagtatgttgatgaccacagggctggtaaaatcgtggttgaattgaacggtagactgaacaagtgtggg

SEQ ID NO: 12397 - DNA, 290 bp, Glycine max
  Clone ID: 701065719H1
caccatgagtaacatgacttccttaagctccttagtgctggtccttgcaggtctaattccaatccctcaaagtcctggcggactaggagaagcccccggtgtacaagcctcccattgagaagccaccactttacaagcccccaattgagcaacctcctgtttataaacctccagttgagaaaccccccatttataagcccccagtagagaagccaccagtgtacaagcctcctgtagagaaacccccagtttacaagcccccagttgaaaaaccaccagtgtacaagcca

SEQ ID NO: 12398 - DNA, 284 bp, Glycine max
  Clone ID: 701065721H1
caaaggtatcatgctcatcaatatactaatggcaccgtatgtgatctcacaaataagccacgagagaaccgaggtgaggttggaatgccctgaaccgagagcaatgattagttcaatcacagagatttccacttgcaagtatgcacttacagtgcaatgtccgcagctatgcaagcacccattatttcaagaggagagaccagtatggcataccatcgactgtaatgtgcttccaaaagatcacgtggatgccaaagtgagacgacccaacgaaaatacggaga

SEQ ID NO: 12399 - DNA, 203 bp, Glycine max
  Clone ID: 701065722H1
gtgttggtacgaaaaatgtcgaagctgatcttcgtgttcctttcgcttattcctcttctctggaacttctttttccccagagagaccctcagatcgacgcgtcctcgttttgctcgatgacttcgccatcaaatcctctcattctctcttcttcaactccctcaaatctcgcggcttcgatctccaattccacctcgcagacg

SEQ ID NO: 12400 - DNA, 279 bp, Glycine max
  Clone ID: 701065723H1
cagaaatgtaacctttgtataacactctgagctgtttgtgccataccaagacccaacagattgattttaataataggacttcctttgatgctggagagtttgggtttggtctctccacggtctcattggtgcccaaccgtgattgcccatcgaatgctcagttcctagatacatatgttcacgctgctgatcgtactccgttactcatcaagaacgcaatctgtgtctttgaacaatatggcagcatcatgtggcgtcacaccgaaacaggcattccca

SEQ ID NO: 12401 - DNA, 153 bp, Glycine max
  Clone ID: 701065724H1
tgtgatttttgaaatgtgatctagaacttgcacttggcaacgttagtttgtcatgtttctaactcaaggtcggtttgaatggttgaaacaaaataaatttgtcaaacaatatgatgcttctttttatgccgattcttgttcagtaagattttt

SEQ ID NO: 12402 - DNA, 275 bp, Glycine max
  Clone ID: 701065725H1
cggctcgagaatggattggagctgtaattgtctttggtgcaatttatgcaaaaaagttcttgaaggaaagaacctgaaaagacaacctctgtagaacatgtacaaaatggaaatggaaattcaaataatttggagaacccatgatggaggctaactcctttgctgacctgacgcggtgttacctgatacaatctgggacggcttcagtttagtttagagctgctgcacattcaatttttcaggtcgtggctaatgcattatatgaaggtggtttg

SEQ ID NO: 12403 - DNA, 273 bp, Glycine max
  Clone ID: 701065726H1
cttaagtatcaggtatcttggatgcatcttcgcccaatcttctataacatggcatacttggggccaagggaagaagaatcacaaaagaattaaacgccgcactttgagtatgaagaatccaaacaaagacaagcttgataagcttgctttctcatcagaagatgccaaacctgatgtatttccttgtctatcaagttgttctgatagtaaagcaaccaaggctggttatagacctagtgctaattttaaatctagtgatgaatctctaataga

SEQ ID NO: 12404 - DNA, 271 bp, Glycine max
  Clone ID: 701065727H1
ctcagtgaaacactagctagggtattgggagctctcgttgtttcggagttagggaccttacgcaagccagggccactgctacgaatgccgccgcccccccaccacgccagctctcccagaaggaagctgacatccagatgatgttggccgccgacgcacacctcggcaccaagaactgcgacttccaaatggaacgttacatcttcaagcgccgcaacgacgggatttacattattaaccttgggaagacgtgggagaagcttcagctagc

SEQ ID NO: 12405 - DNA, 196 bp, Glycine max
  unsure at all n locations
  Clone ID: 701065729H1
ctctcattgtgccattacaccattacttctactctttctttgttgttgacataccccttttgataatcaaacacatatcctanacaaggtatatatatataccaaaatgtgtagctctaagaccaaagtgactgttggtttagaagccgttcccgctgntgcgaaccctcagtggctagaatcaatggaaggccat

SEQ ID NO: 12406 - DNA, 269 bp, Glycine max
  Clone ID: 701065730H1
tctcatgccattcctttgaataaacaattgtacacgctgagctatgcttgtgtaacatctggagcagcagaattacttttttcagccttctatattatggttgatatttggggtttaacattcttgttcttgcctttgaaatggattggcatgaatgccatgcttgtttatgtcatggcagctgagggaatcttcgcaggattcattaatgaagacatgtctctggatccaatagattcacttgtgtgtcctgtcccttcaagtttcat

SEQ ID NO: 12407 - DNA, 196 bp, Glycine max
  Clone ID: 701065731H1
atcggccaaaacagcatcgtttcaccacttactacatcttgtctgcttctctgcttcatgcccccacaatcgtctcatcttgttgcttctgcatataagttgactaaaggttcgatgtcaacaagttggttgcatatgacctttttgctcactgttcaggaaagaatgctacatatgcatcctacttatgatttgg

SEQ ID NO: 12408 - DNA, 268 bp, Glycine max
  Clone ID: 701065732H1
caacactcaaaccccacactggacaccatctctctcatgaagcaaggcttcctcatgatggaggaggactttgagagaggaccaagataccatgcatacgctgcgttgagggaaacaaagcttcgcatgaagtacacgagacaacaagaatacgaacaagaagaagaaaaagagggtgttgttgaagcaaaggtcttaactttaaccccaccaagaaaaaaacaagtcaagtttcaagatggtggtactggtgtggtttctgggagaa

SEQ ID NO: 12409 - DNA, 292 bp, Glycine max
  Clone ID: 701065734H1
gccgattttaaaagatgagtaagcttcagagtgatgctttgcgtgaaagcatttcaggaatcatgggcgaatcccaaggggaggattcgcaaatttgtggagaccatcgaactccaaatcgggttgaaaaactacgatccacagaaggacaagcgtttcagtggctcctgtcaagctgccccacatccctcgccccaagatgaaaatttgcatgcttggtgatgctcagcatgttgaagaggcggagaagataggactggactggatggatgtggaagccctgaagaagcta

SEQ ID NO: 12410 - DNA, 209 bp, Glycine max
  Clone ID: 701065736H1
ggccgttcagcaggagaatctcaagctcgcggacgcgctcgtcaagcacgtgggcataattcggggtttccaaagccggggccatgaggaaggttgcttcctacttcgcccaagccctggcgcgtagaatctacggaatcttccccgaagaaaccctcgattcctccttctccgacgttctccacatgcacttctacacatcttgccct

SEQ ID NO: 12411 - DNA, 282 bp, Glycine max
  Clone ID: 701065737H1
gcaagaatggcacttcgttgcttggtgatgtcctttctgttctacctcatcttggtcttgcgagaaaaaagcaatgccagagacgaagatttttggcatgctgtttggccaaacactcccattccaagttcattgcgagatcttctaaagcctggccctgcaagtgttgaactcgatgatcaccctatgcaaattgaagaaacacagtacccgaaaaccttcttctataaagaagaccttcatccaggcaaaacaatgaaagttcaattcagcaagcctccc

SEQ ID NO: 12412 - DNA, 203 bp, Glycine max
  Clone ID: 701065738H1
gttgttctacttgataataactctatgaagcaattagagcctagtagccccaacgctccttctttgaatgattagattggatggtgcagatttcgggtcattcccagcatggaagtctaataatgtaaagtcatggatatggatgcagcaagcgatgcaccctgaattgaattacaacagctgtttccggaagacatggatgc

SEQ ID NO: 12413 - DNA, 277 bp, Glycine max
  Clone ID: 701065739H1
ggctgatggtctcaatgcggaggcaagggttggtgtgcctggtgaacatcagcgtatccttcgtgaacctcaaggtattccggcttctcaagcactggctgaaggctggagaacctgatcccttttacaaccctgtcaatgattatgtgattctacctactgcttttgaaatggagaggcataaagagaagggtgtagaagtagcatcccttaaagaggaatgggaaattatttctaaagtccaagatgaccaaagctgcacagcagataaagtgtg

SEQ ID NO: 12414 - DNA, 273 bp, Glycine max
  Clone ID: 701065741H1
cgggtgaccatgtcaaattggtgacggctggaaagcatcacgtctgatcgcacacttttctcctcgtaaaaggttttcctttttccatgaatgcattgtttcattaaagtggtgctacaggtggttttccttgtaaagggtccaatttacttggtctgcatcagctgcacggaagagccttatgagtcactaagggggcagttggagcttattcatggtcagatgattgtgatactcaacaaagtcagtaaacagatgttttgagaagaatcc

SEQ ID NO: 12415 - DNA, 270 bp, Glycine max
  Clone ID: 701065743H1
atccagctctgaaccctgaccacgtccctcacattctgaagaagtggcctgatgccaattccagacccaaaggcggtgcagtacgtgagacacgaccgtggcactcccatgattctagacaacaactactacagaaacatattagacagcaagggtctcttgatagtggatcaccaactagccaatgacaagaggaccaagccttatgtgaagacaatggccaagagccaagactatttcttcaaggacttctctagagccattaccttg

SEQ ID NO: 12416 - DNA, 268 bp, Glycine max
  Clone ID: 701065744H1
acatcatcaagatcaacgctctcccttccatcattgaggcgtttccaatctgaagaagatgcccattaccacaactgcatgtggtttttatgttgcatgtgttgttgttattattaacagctatatgatcttcgttttaattttgtggttttccttcctgcccttgttatgtttgtgcattaaataaaagtaagaaatgccccaccactaagtaatgctatatggattatgtatgtgttccatatatgtcaagtgagtggtgtgtggt

SEQ ID NO: 12417 - DNA, 266 bp, Glycine max
  Clone ID: 701065746H1
atatgaattacatagaatgcatcaatgtagactacaaatcaactagaaaggagtcattttatgaccttcagcttgatgttaaaggttgtcgtgatgtttatgcttcctttgataagtatgtcgaagttgaaagtcttgagggggataacaaatatcatgctgaacagtatggtttgcaggatgctaagaaaggtgtcctatttattgattttcctcctgtccttcaactccagctaaaaagatttgaatatgattttatgcgggat

SEQ ID NO: 12418 - DNA, 270 bp, Glycine max
  Clone ID: 701065748H1
aaggacaaatggagggtccttagttctgtttctctttcttctctctgtgctttcaaccaagttctcagatcactcttcttcttcacccttctgatctgctaattctcaaggtattcaaaattgggtggttttcgattgaactgtgatgtccaagccactgctaggcatagcggaagagcgaaggtcaaagcaatgtcactttgttggtttcttcctcagccaccatggaaagtgtgtgcctgaatagctcaaaactgaaagagcgcaact

SEQ ID NO: 12419 - DNA, 208 bp, Glycine max
  Clone ID: 701065749H1
cgagttacagccgcaccttgattcagagcagagcgaccttgaagagctatggctgtcggaaaggattaggagatttccaaagggaaagaagggtggcaggagaaaagcgttgatccctttgcaaagaaggactggtacgatatcaaggccccttcggtcttcaaggtcaagatggttggcaaaaccctcgtctctcgtacccagggaa

SEQ ID NO: 12420 - DNA, 211 bp, Glycine max
  Clone ID: 701065750H1
cggttacaccgagcagccacacctcccgcagcagccatggttctcaaaactgaactatgccgattcagtggttgccagaatttaccaaggaaagggcatcagattggttcgtggtgattcttaggttttcctgtttgcaaactcaaaatgtaagagctatttccacaatcgcctgaagccttcaaagctcacctggactgcaatgtacaga

SEQ ID NO: 12421 - DNA, 206 bp, Glycine max
  Clone ID: 701065751H1
ctcttacacatcgaagcactggtactactactactttctctctagatatggggtccccctgtgtagaagtggttttggaactaggggcacttggttagctcaggcttacctcaaataccaggtgttgcaccgtcagaaccacgaattatgagtccattactaccaccacccaggtcagcatctggaccagcacccaccacaccagg

SEQ ID NO: 12422 - DNA, 103 bp, Glycine max
  Clone ID: 701065752H1
atgaaacctcttcttccctctctcctaattctctctcactacatccatcctcgtaaaacaaaacgaactcctaacttcggtccaagtttaacacgtgcttcaa

SEQ ID NO: 12423 - DNA, 280 bp, Glycine max
  Clone ID: 701065753H1
atttcacccaaatataaatagcaatggaagcatttgccatgacatattgaaggagccatggaagcctggggctaataatttcaaaggtgtagctctcaattagttccctgttgacggaccctaatcctgacgatcctttggtccctgaaattgcccacatgtacaagacagacaggaacaagtacgagtcaactgccagaagctggacccagaaatatgccatgggttaagtgaccttgtggtatgtttgagggagagcctttctactctcagtgtttag

SEQ ID NO: 12424 - DNA, 278 bp, Glycine max
  Clone ID: 701065754H1
gtgaaaatggcgcagtgtgtgaccaacacattcgtgcaaggaaaaccctttcttccaattggaggaagttccaattaaaaatgttcggagagcggttcagtgcggtgtgtggtgcaagaagaaggagatacacccgcaattctacgaggaatcgaaggtgtactgcaacggggagctggtgctgacgacaggtgggacccagagcgaatacgtggtggacgtgtggtcggggaaccaccccttctacctcggaagccggtcggcgtctatggtcagcg

SEQ ID NO: 12425 - DNA, 271 bp, Glycine max
  Clone ID: 701065756H1
cttccatctcttgcttcttgcttctattacttgcttctttcttcaccatgtcacttgctgggaaaattcacaacgaaaattggggttcatgcaaccgctgcaaagtggttcaacctctttgcaacacaacttcatcatgttcaaaaccttactgatagagtacatggaaccaagctgcatcaaggtgaagactggcatcacaacgagacagtcaaacactggacttataccatagatggtaaggctacaacatgtctggagagtattgaat

SEQ ID NO: 12426 - DNA, 267 bp, Glycine max
  Clone ID: 701065758H1
aaaaagaccagcggttgacgatgaaacagaagtgtcttgttgttctggtctttgttgttcccttggcctgtgcggttggttgggatgagggtatacccggcggatggaaccccatcaagaacattaacgatcctcacgtgacggagatcgcgaatttcgccgtgacggaatacgataagcaatccggtgagaagctaaagttggtgaaggttatcaaaggcgaccttcaggtagtagcaggcctcaactaccgcctcagcctcaccg

SEQ ID NO: 12427 - DNA, 88 bp, Glycine max
  Clone ID: 701065759H1
caatccgtcacgaaaagtctacaccctgtcgtgtaacataaaaaccaccgaagaaaacatcactgcgcggcgctgccacacaacatac

SEQ ID NO: 12428 - DNA, 264 bp, Glycine max
  Clone ID: 701065760H1
ctggcgcagtaccctgaggcttctcttctcttctcttctctgtcgtgagtcaccatggtgagggttaatgtgctgaacgatgctctgaagagcatgtacaatgctgagaaaaggggaaagcgccaagtcatgattaggccatcctccaaagtcattatcaaattccttttggtgatgcaaaagcacggatacatcggagagtttgagtatgttgatgaccacagggctggtaaaatcgtggttgaattgaacggtagactgaac

SEQ ID NO: 12429 - DNA, 247 bp, Glycine max
  Clone ID: 701065762H1
cagggtgatgctgacagtgccctagatcgcttgtggcagaagaagaaagttgaagttaagcaacagtagacacccatgatagtttgttactttgctatgtattaatttctacgcttgctagagatatttgagtactatgattgtcgtcttgagcaaatactcattctaaattttcgttggtatttggtaccgccagctaaatttgcttttttgacaaaaaaaaaaaaaaaaaaaaaagggggggccc

SEQ ID NO: 12430 - DNA, 264 bp, Glycine max
  Clone ID: 701065763H1
agctagtttatcgtgaggagaatatgaagttgtttgtcttctttgttgctgcagccgttttggtagcatggccatgccatggcgcaggctaccaaaggttccctctccgaatgaaaactggctatggtgagcgttcttcggaggtaaaatgcgcaagttttaggcttgctgtggaagcacacaacatccgagcctttaaaaccattcctgaacagtgcgttgaaccaacaaaggactacattaatggcgaacaatttagatcag

SEQ ID NO: 12431 - DNA, 266 bp, Glycine max
  Clone ID: 701065764H1
cttgagaacactgtaaaccgtgatgatgaggccaatggcaatgttccacatgtcatcccagcttctaacctagctaattctgttttggataagtcagagattgttgatgacattagtgccaatttgggtcactcggtggtagctgtggactctgaagagcctgctattaagaccgagaaaaatgcacctgacctgcagagagagctgccagagtctgttctgcaagatttaagatcatctccagaagcttcacctagaagccattt

SEQ ID NO: 12432 - DNA, 289 bp, Glycine max
  Clone ID: 701065766H1
gtttcttcctttctctgctctttgccttctctgacacatttggtgccttgtaaaacgtgttttggcaaggacgttgtaatgccgaagaacgttgaggttgctgagcgtggctccttctctgggaaggactaccaggaccctccaccagcaccactcattgatgctgaggagctcacaaagtggtccttttacagggctctcattgctgaattcattgccactttgctcttcctctacattactgtgctcacagtcatagggtacaagcaccagactgacctcaaggaaa

SEQ ID NO: 12433 - DNA, 289 bp, Glycine max
  Clone ID: 701065767H1
tatgggatctggaagtggaaaacacactggagagttcttcaggagaagggatgcatggaaggaagattcggttgttcaccattcagttccgcaaggcaacccctggccttggcatcgccgtcgtcgccttcggtatctacctcgtccggcgaacaagtctacaataggctctatgctcccgatcctcattcgatttctcacgtgaaagccggggatcaccactaaacgtttggacggacgcactccattccatcatcacttaataagcttgctagcatgttctcgcagc

SEQ ID NO: 12434 - DNA, 285 bp, Glycine max
  Clone ID: 701065768H1
atcggaaaagcctcctctccctcgcaatcatcgcccctgtcgtcgtcgccgtcggaggacaatcttcaagggggttggccaacaacttctcttccggttgccacaaccactccctttgcatccccagccacagccccttctaagccaaaatcaccggcgccagttgcttctcccacgtcatcatctccaccagcttcgtcccccaatgctgcaaccgcaaccccacccgcttcatctcccacagtagcatctcctccgtctaaagctgccgctccagctccggtg

SEQ ID NO: 12435 - DNA, 277 bp, Glycine max
  Clone ID: 701065770H1
atcgattccaacaaagtcttctaaaaatattagtgttgttgggaaccaaggtgtccaaaacaccaataattaacaaagccacattcacaatcaaacccaagaagtactctcaacataatgagttctgacgcgttgaaagttgctgccgaagggaataacatacacggtctctaccaagagattcagcaggatccacgtattctggagtccatagattcaatcccatttgttgaaactcctttgcatgttgctgcaactcttggtcattttgagtttg

SEQ ID NO: 12436 - DNA, 273 bp, Glycine max
  Clone ID: 701065772H1
aaggaatcagtgctgaggtcattaatttgcgttcaatccggccgcttgatcgatccacaatccaatgcttctcccaggaaaaccagaaggctggtgacagttgaagaagggtttcctcagcatggcgttggcgctgaaatctgcacatctgtcattgaagaaagttttggttatcttgatgcacccgttgagagaattgctggggctgatgttcccatgccttatgcagcaaatctggaaagaatggctgtcccacaggttgaagatattgtt

SEQ ID NO: 12437 - DNA, 270 bp, Glycine max
  Clone ID: 701065773H1
gtgaaacctagctagccacaatgcagatattcgtgaaaaccctaacggggaagacgataaacctaaaaggaagagtcttcggacacgatcgacaatgtgaaggcgaagatccaggacaaggagggcatcccgccggatcagcagcgcctgatcttcgccggaaagcagctggaggacgggcgcacccttgccgactacaacatccagaaggagtccaccctccacctcgtcctccgcctccgcggcggcgccaagaagcgcaagaagaag

SEQ ID NO: 12438 - DNA, 262 bp, Glycine max
  Clone ID: 701065774H1
tgtatattgatatatctaggtgtgggtggtacgtaattaattagccatggacaaggcacgaattggggttttccttcaggtggctcattctcctttcttctcagatggtggtacaaacagagggaaggcactgtgagtcaaagagccatcggtttaaagggatgtgcctcagtaagcacaactgcgcttcggtttgccatcttgaaggcttcacgggtggcaagtgtcgtggatttcgtagacgctgtttctgcaccaggca

SEQ ID NO: 12439 - DNA, 264 bp, Glycine max
  Clone ID: 701065776H1
cgtttctgcccctttctttctctgaatcgaaaccctagaacttcgtcgtcttgtcttccagaatctgacaacttccctcatccgaacctaaattctctcatcaaaccctcacttatccaatccccacccaaattccccgcatcgacctcacccccctaaattcccccatcgccggctctctcacggccgaattcatcgcatcgccggttccgctacggtggctatcgcatgggtacccctcctcgagaaaacgcgaagccgtcg

SEQ ID NO: 12440 - DNA, 265 bp, Glycine max
  Clone ID: 701065777H1
agagtttgttgtgagctataagctagtttatcgtgaggagaatatgaagttgtttgtcttcctctgttgctgcagtagttttggtagcatggccatgccatggcgcaggctaccaaaggttccctctccgaatgaaaactggctatcgtgagcgttcttcggaggtaaaatgcgcaagttttaggcttgctgtggaagcacacaacatccgcgcctttaaaaccattcctgaagagtgcgttgaaccaacaaaggcatacattaa

SEQ ID NO: 12441 - DNA, 262 bp, Glycine max
  Clone ID: 701065778H1
acaaccgtactgcacaactccaccactgtgcaatggccgacgaggaacctgttgatcagaagagctatcttgaagagtcttgcaaaccaaaatgtgtaaaaccattactagaataccaggcgtgcattaaaaggatacatggtgatgaatctgggcagaaacactgcactggacaatattttgattattggtcttgtattgacaaatgtgttgcaccgaagctattcaccaaactgaagtaaatcgggaaggatttgatggc

SEQ ID NO: 12442 - DNA, 137 bp, Glycine max
  unsure at all n locations
  Clone ID: 701065779H1
ctgatccgtttcgttcagatcaaaacttgcctctttgcaacgctgcttctgancagaaacgcttgtagcatccgaaaatggcggacacagtggaacatacagatcagagggctgaagctatgccccaatccacagaa

SEQ ID NO: 12443 - DNA, 263 bp, Glycine max
  Clone ID: 701065780H1
gaaaaaagcgatcatagtttcacttcggccttatccagtttagggtttcggttctctaccctatctttcacgtatcgaaaccttaaatttacgatcaggtctgagcaatctggttggtagaacctttggtcttagtgagtcaagttttatgtctgaattagacgatcaaattcctactgccttcgatcctcttgctgatgcaaatgctgatgactcgggtgctgggtcaaaggagtatgtgcatattcgtgtacagcagcgaa

SEQ ID NO: 12444 - DNA, 247 bp, Glycine max
  unsure at all n locations
  Clone ID: 701065782H1
cattgtcttataattagcatggactttagcgcagttcaagtggtcatgatantcggggctttaagcaaccgcgtgtgtagcacaagcccctggacctgcacccacgcaaccaccatcaacgaacccatcaccgtccacgtcagcacccgccccatcaccaaccgcaaacacccctcctcctgcggctgcacctgcacccgcaacacgcacacccacactcgctccttcatctccaactccaacaaca

SEQ ID NO: 12445 - DNA, 287 bp, Glycine max
  Clone ID: 701065783H1
cactcgtctccgagctcgtttcgttctcgaagaatcgatctgcgataaagactcgcggtaaccaaaaggatccgtaaacgcgaaagggctcaggctagaaccggtggtaaaggcaagcagaaagatgatgggttgacccctgaacagcgcagggaaagagatgcgaaggcgctgcaggagaaggcggcaaagaaagcggcacaggatgcaggagggaataatgcaggtggaaccaaaaaataggcaataattcaatgagtggtttgagttcgacattgttgtttgta

SEQ ID NO: 12446 - DNA, 280 bp, Glycine max
  Clone ID: 701065784H1
agagtttgttgtgagctataagctagtttatcgtgaggagaatatgaagttgtttggtttccttggttgttgaataagttttggaagcatggccatgccatggcgcaggctaccaaaggttccctctccgaatgaaaactggctatggtgagcgttcttcggaggtaaaatgcgcaagttttaggcttgctgtggaagcacacaacatccgagcctttaaaaccattcctgaagagtgcgttgaaccaacaaaggactacattaatggcgaacaatttag

SEQ ID NO: 12447 - DNA, 278 bp, Glycine max
  Clone ID: 701065785H1
tgttgatcgagataactagaaacagtgtgatgaaaatgaaggtccttgttttcttcgttggtaacattttcggtagaatggcaatgccatgcgtacgatatgttccctctccgaatgaacactggctatggtgcccgtactccggaggtgaaatgcgcaagttggaggcttgctgtggaagcacacaacatctttgcctttgagaccattcctgaagagtgcgttcaagcaacaaaggaatacatccatggcgaacaatatagatcagactccaaaac

SEQ ID NO: 12448 - DNA, 274 bp, Glycine max
  Clone ID: 701065786H1
gctcaaccctagtaagccgcaatggtgaagtactcaagggagcctgacaatccaactaagtcctgcaaaggctaaaggcgccgaccttagggttcattttaagaacacaagggaaactgcctttgcaatcaggaagttgcccttggtcaaggctaaaaggtacttggaagatgttcttgcccacaagcaggcaattccattcagacgtttttgtcgaggtgttggaaggacagcccaggctaagaatagacactctaatggccaaggacggtgg

SEQ ID NO: 12449 - DNA, 195 bp, Glycine max
  Clone ID: 701065787H1
gccatggctgctctgcaatacttggaatcgctgcgcaacgcgcatcctgaggtctccgattggcaaaaattcgctgccggatctataccagaacaagctctggcaccagcttaccctcaagcttgagcagttcgtggctctcgccgtcttccaggccggtgatgcatcaatacaattatatcacaatttcatcac

SEQ ID NO: 12450 - DNA, 270 bp, Glycine max
  Clone ID: 701065788H1
cgcctcggctagggttcggaaacgaagaagggttctgttttcttttcgcgatgaggggcaagttgaaagaggaagcgtatgaggaggctgaagaggaagcgccgaaagatgagacagagatccaagtagtgcgttaaacctagtttgtttccgttgcttttacaattgcttatgttgtcaaataggacacccagttgttagtggcactggtctctcctttttgatgttttgatacattttgttggattttatttcgtcttatgttcttag

SEQ ID NO: 12451 - DNA, 267 bp, Glycine max
  Clone ID: 701065789H1
cagaactgaagcggaacccttcttctgcgccagttccagtgtcccactgtgtgcagagtgcaatgattagaaatctagctacctagttagggttaggggttctgcgtttctgcgaagatgactaagttcaggaaattgggtcgacccaccggtcaccgaatgtccatgctccgaaccatggtcacgcagttggtgaagcacgagcgcatcgaaactactgttgccaaggcgaaagagatcagaagactcgcggataatatggtgcag

SEQ ID NO: 12452 - DNA, 266 bp, Glycine max
  Clone ID: 701065790H1
ctcactcgccgtcgtagggtttctcctttcgtttaccaacaacaacaatggttgcagcccaagaaaaccaagaagacccatgagagcatcaacaacaggctcgctcttgtcatgaagagtggaaaattcaccctcggttacaagacggttctcaaatcacttaggagctccaaagggaaattgattatcattgctaacaactgcccccctttgaggaaatcagagattgaatactatgctatgttggccaaggttggagttcatca

SEQ ID NO: 12453 - DNA, 266 bp, Glycine max
  Clone ID: 701065791H1
cacagaagcagaaggaggagaagcagaaagaggagacgaagcaatggcgccgaagaaagcccgaaaccactccgaggaaccctgatttggtccaggggaattggcaaatattcgaggtcgcagatgtaccacaagaggggcatctgggccatcaaggccaaaaacggcggtgttttgcccctccacgatcccaagcccaaacccgaggccccggcccagaagccgcccaagttctacccggccgatgacgtgaagaagcccctcgt

SEQ ID NO: 12454 - DNA, 263 bp, Glycine max
  unsure at all n locations
  Clone ID: 701065792H1
aagaaggcgtcttcataaacgcctttcttctccgtttccgtttcctcgttcgatttnngtttttcgatctgcgaaaatgagagagtgcatctcgatccacattggtcaggctgctatccaggtcggaaatgcttgctgggagctctactgcctcgagcacggcatcgggcccgatgggcaaatgccaagtgacaagacagttggcggtggtgatgatgctttcaatactttcttcagcgagactggtgctggaaagcacgtgc

SEQ ID NO: 12455 - DNA, 264 bp, Glycine max
  Clone ID: 701065793H1
tgttgatccatctcttgtttcttgctttctttcttcaccatgtcacttgctgggaaaatcacccatgaaatcggggttcatgcaaccgctacaaagtggttcaacctcttcgcaacacaactccatcatgttcaaaacctaactgatagagtgcatggaaccaagctgcatcaaggtgaagactggcatcacaacgagacagtcaagcactggacttataccatagatggtaaggttacaacatgtctggagagtattgaatcc

SEQ ID NO: 12456 - DNA, 261 bp, Glycine max
  Clone ID: 701065794H1
gtttggaaaatctgtcccgcagacactatctacacctttcatactcgggacctcagatctatgtgccatgcaacaggactgttctggcgatttacatgcagttgggtctctcctctacgataaagcaggggttgaatccaatttaagtgaaagagaaacagttttggaggtttgtgagactattgtaaagcgaggcgggagcttagctggtgcaggaatagtggggattctacaaaaaatggaagaggaccagagaggtct

SEQ ID NO: 12457 - DNA, 280 bp, Glycine max
  Clone ID: 701065801H1
attcctcttcccattctagggttcccaaatggacgctggcggaaagatcaagaagggcgccggaggaagaaagggcggcggccctaagaagaagccggtttcaaggtccgtcaacgccggtctccaattccccgtcggaagaattggccgttatttgaagaaaggaaggtacgcccagcgtgtcggtaccggtgctcccgtttacttggccgcagttctcgagtacctagctgctgaggtgcctgagttggctgggaatgctgcacgtgacaacaagaag

SEQ ID NO: 12458 - DNA, 277 bp, Glycine max
  Clone ID: 701065803H1
cgtcaagcatggacttggatgttaccatttcagaaacggagataggtatgctggagagtactttggagataaaatacatggctttggtgtctaccactttgccaatggccactattacgaaggttcatggcacgaaggtcgtaggcaaggttatggcatgtatatgtttcgaaatggtgatggaagatgtggtgaatgggatgctggcaacctcaaactctctctaccaccacaaaatgatgctatcattcgcacagttcaggctgctaggaaaaca

SEQ ID NO: 12459 - DNA, 277 bp, Glycine max
  Clone ID: 701065804H1
ctggtttggtcccatatgatggccagattcatctcgaagaagaccaagacctagctactccgtcattccgaatcggctaagggcgtgatagtgggtggagatcgacggagtgaggctgttggaggatcacgtccaccgtcttatggtgaagaaggccacacccgattggcttcccttcctccccggttcctccttctgggtcccacctcctccttcccctctccttcacacattctccatcccctctcatcccttcttccttcaacaagacgacgaa

SEQ ID NO: 12460 - DNA, 276 bp, Glycine max
  Clone ID: 701065805H1
ccactgaatcatcccctttcaagaaaattcagattcaaagggatgacactacatttgacgcatatgtggttggaaaagaggatgctcctggaattgttgtgattcaggagtggtgcggtgtggattacgaaattaagaaccatgccgtgaagatttctcagcttggtagtgggtttaaagctcttattccagatttatacagaggaaaggttggtctggatgttgctgaagctcagcatttgatggatggtcttgattggcaaggtgctgtgaagg

SEQ ID NO: 12461 - DNA, 87 bp, Glycine max
  Clone ID: 701065806H1
caccgcacgaatatcttgttgtctggagcgatccgagaagaactctgtacacatctaggtttaccaggacctgcttacaggtgacag

SEQ ID NO: 12462 - DNA, 237 bp, Glycine max
  Clone ID: 701065807H1
gtgtgttagtatagtgtccaaaggcacgcagcgagtttatgctcggcgggatcatcacgagattgcaaaatgaggttcgacattgcaaatcccagcacttggttccataagaagctggaaatcgattacgacctgaagcttcgggcattgtgggacaagaggatctcccaggatgtccttggtgacgccctgggtgaggagtttaaaggatatgttttcagaatcactggtgggtgt

SEQ ID NO: 12463 - DNA, 176 bp, Glycine max
  Clone ID: 701065808H1
aattaataacaagctagctattagttcgattttgtagtaagtgaggtgccaatatggtgaagatagctcttggtactttggatgactcttttagcgctgcctctcttaaggcttatttcgcagagttccacgcaactatgattcccgtgttcgctggtgttggatcagccatcgct

SEQ ID NO: 12464 - DNA, 271 bp, Glycine max
  Clone ID: 701065809H1
cttcaatttataagaatggcactttctcctattcgttcttcttcactctcttcatcagctattgttgcattggctgtgttactgcttcttacagggacctcttcagctaacctctcaaagaacttctattccaagacatgtcccaacgttttcaacactgtaaaatctgcagttaaatctgctgttgtcagagaacctcgcattggggcatctattgttcgtctcttcttccatgactgctttgttcaaggctgtgatgggtcaatactac

SEQ ID NO: 12465 - DNA, 271 bp, Glycine max
  Clone ID: 701065810H1
ctttgcagattgattacatccttggaaataacccaaggaaaatgagttatgtcgtacgttttggtaatcattacccaaaacacgtccaccatagaggagcatctgtaccgaagaacacagatcaagtatagctgtaaaggtggatggaaatggagggacacttctaagccaaacccaaatacaattgttggtgccatggttgccggtcctgacaagcatgatggcttccatgatgttcgtacaaactacaattacacagagccaacacttg

SEQ ID NO: 12466 - DNA, 251 bp, Glycine max
  Clone ID: 701065811H1
gtgctttgcatcaggaaagcctgcaacaaagtggacatactggggaagaagttactaggctactggctgttgattgtggtattttctggaattaatttggtatttaatggtaccttgtacgaatttgtggatcacacagatattagttttcttctcttgggaatatttttcaactgatagttttactttgatttttatatggtgcaatatttattttggattaaaagatgagtattacatttgttgccgtc

SEQ ID NO: 12467 - DNA, 268 bp, Glycine max
  Clone ID: 701065812H1
aagaaagtgagcaacaagacaaaggaagtggtgaactctactatatcaagcaatgcaggggagaagttgaggttcaaaacctttaacagcatcaaaataagtgcaattggcaacattttgcacattttattggctgcatatctccctactttgttgttagtccttttatgaggtgctaataattcaattttttgttctttttggaattttgaatttcatagagttaaggatgaggtcataagagaaaaggaatcgagcatgatatgta

SEQ ID NO: 12468 - DNA, 265 bp, Glycine max
  Clone ID: 701065813H1
gcacgacactgagcatcagcaatggcaagcgcaagtgttggtaaagaactgacgctgtattcgtattggaggagctcttgttcccaccgagtccgaatcgctatcaacctcaaagggcttaaatacgaatacaagcccgtcaatctgctcaagggagaacaatctcgccctgagtttctccagctcaatcctgttggttgtgtccccgttctagtggatgaccacgttgttctctatgactctttcgccattactatgtatttgg

SEQ ID NO: 12469 - DNA, 265 bp, Glycine max
  Clone ID: 701065814H1
aagaaagggaataaggaaacccttcttcacttctacctctaatctaggaataggaaaaagatgggcagcactagtgcgagtgccctcaggctatcgtcgatggtcagcgtgtccccgaattgcaattgctcatcgatgacgcttatgaagaagacggcgatggcgatggcgatggctcctttttcacttgcaatgaaaatcaaaagcaaaaggggtggtattaggtgcgaggtggctattaatgcggtggatgaggagtcgagga

SEQ ID NO: 12470 - DNA, 264 bp, Glycine max
  Clone ID: 701065815H1
gcggcggccaagccatctcaagccggagctgctcttcacccttcctcctactcggtacaacacaacaacatttgttgacgagtgaatgggtgcgacggaggccaacacgacacttcaagctcgtcccgaaacgacgtcggagaatatcgaagcattgcttgatgctgcaagatacgatgacatggatgatgttaagagcttagaagccagtggtgttcctcttgattccaaggatgaacaagggaggacagctcttcatatggc

SEQ ID NO: 12471 - DNA, 265 bp, Glycine max
  Clone ID: 701065816H1
gcactcttcgttcttcgactgtctacgatctgctttctctgaattgtgaaaatgtcgctcggagaaactgcttgttcatacgcagctctcatccttcatgaagatggaattagtgtaactgctgacaagatcagcaccttgttgaaaactgcaaaggttccagtagactcttattggccaaccttgtttgctaaacttgctgagaagaaaaatcttggcgatttgatagcaaatgcggcaggcggtggtgcaccagttgctgttg

SEQ ID NO: 12472 - DNA, 284 bp, Glycine max
  Clone ID: 701065817H1
cttcaagattcaggtactgcgtttcggaagcagacacagatggctcgtacgaagcaaaccgctcgtaagtccacaggaggaaaggctcctaggaagcagcttgcaaccaaggctgcacgtaagtctgcaccaactactggtggtgtgaagaagccccaccgttatcgtactggtaccgttgctcttcgtgagattaggaaataccagaagagtaccgagcttttgatccggaagctccccttccagaggctggttcgtgaaattgctcaggacttcaagactga

SEQ ID NO: 12473 - DNA, 277 bp, Glycine max
  Clone ID: 701065818H1
cctcgagccgaatcggctcaggctaagccttataaataataagaccaaaaaaaaaaaaacaccaaacaacgagagagacaccatgggttcaatttcagaatccgaaagtgtttgcgttacaggagcctctggtttcatcgggtcatggcttgtcatgagactcatcgaccgtggctacacggtccgacccactgtacgcgatccagctaacatgaagaaggtgaagcatttggtggagcttccaggtgcaaagaccaatttgtctctgtggaaggct

SEQ ID NO: 12474 - DNA, 279 bp, Glycine max
  Clone ID: 701065819H1
cattctcccatttcctctcagaaccctcgatcactcccacgcgctcctatatcctctccttcaccgtcgctctctccaacgatcacaacaacatcgtcatcccatggcaaacgccgcatctggtatggcagtccatgatgactgcaagttaaggtttttggagctgaagacaaagaggacacaccgtttcatagtttttaagattgaggagcagcagaagcaggtcattgtggagaagcttggtgagccagcccaaggctatgaagatttcactgccag

SEQ ID NO: 12475 - DNA, 278 bp, Glycine max
  Clone ID: 701065820H1
cagagatgatagctattggctttggagcccctccttctccacttccgtttcatcgtcgcctggcttcctctccttctcctttggccttcccaataatccacaaattacaaaacgaaggcaagtcagtgataacaatctgttcaaagaaaaatgcaaaatcaagggtggtcactctctgctctgcacctgtgcaagttgatatgcaggagcaggaggttagtgatattactttgagagagagaagtgtttcggttgtcctattggctggagggcagggc

SEQ ID NO: 12476 - DNA, 275 bp, Glycine max
  Clone ID: 701065821H1
gccacgctgaggcctaagatctccgaattccaagcgcctcttgatagggtctcccattttcaattccttctcagtttccttttctctgaaaaaagatgttgagggttgcagctaggaggctctcttctctctcctcttcttctccgttgcggcccaatcacgccgcttccgcttttctctctcgaaacgacgtcgtcgtcgatgaccacagatctgttccttcctcccatccccttcttcccttccgaggttttgctactgaatccctgatccac

SEQ ID NO: 12477 - DNA, 270 bp, Glycine max
  Clone ID: 701065824H1
gccataacctaaccttaaaaggctaaaaccttttgtgtttgcgccgctctaaagccaagcctgagactcgcgactcaccaccactgctcgccggcctctaattttgaaagcttctgcgcctcccacgccatttttgatactctctttgtgttcgcatagtgagatatggggaagaaggcgaagaaagctatgaagaagaatttgaaaagggcttcctttaataagaatccatctgaggatgctgatttcttgcccttggaaggtggcctg

SEQ ID NO: 12478 - DNA, 178 bp, Glycine max
  Clone ID: 701065825H1
atccaagccatttacaaaaatggtaaccattaaagcatcttacacagtccttccaaatgaaccaactccggagggccttttatggctatctgatattgatcaagtggcacgtctacgccacacacccaccatctacattttccatgcaaaacacaaccatgatacattaattgagagg

SEQ ID NO: 12479 - DNA, 269 bp, Glycine max
  Clone ID: 701065826H1
atttggcgttgcatggcccgaattcgaccaggatccgaacccaaaaccgtaactgtgtgtagaagcaacccctataagacgggcaatcatatcattggtaacaaccaagtgatatgcaaggttgatgctgcaagtgaatcctcaattcttgacactgatttgacagttttagctagcatgcttgtggatcaaggtgtggatgagaggaagcaaattgaggaagcagttgagagagaccaaggtgtgagtgattacttcgtctatggtgt

SEQ ID NO: 12480 - DNA, 269 bp, Glycine max
  Clone ID: 701065827H1
atcggcgcggcacccacacacacagttcgtcggaatgggaagggtgattcgcgctcagcgtaagggttctgggtcggtgttcaagtctcacactcaccaccgcaagggtccggcgaggttccgcagcctcggcttcggcgagcgcaacggctacctcaagggcgtcgtcaccgacatcatccacgaccccggtcgcggcgcccctctcgccaaggtggcattccgccaccccttccgctacaagaagcaaacggagctcttcgtcgccg

SEQ ID NO: 12481 - DNA, 268 bp, Glycine max
  Clone ID: 701065828H1
tttacaccgagcagccacacctcccgcagcagccatggttctcaaaactgaactatgccgattcagtggtgccaagatctacccaggaaagggcatcagatttgttcgttgtgattcttaggttttcctgtttgcaaactcaaaatgtaagaggtatttccacaatcgcctgaagccttcaaagctcacctggactgcaatgtacagaaagcaacacaaaaaggacattgctcaagaagctgtgatgaagaggagacgtgctgccaaa

SEQ ID NO: 12482 - DNA, 265 bp, Glycine max
  Clone ID: 701065829H1
caagagatattgttcatggtacccatgtatgttatactactcaagagatattgttaattacatatgcaatgatgaagatataaaagctgtatcgtttgttggtccaattacagctggaatatatgccacagcttctgctagagggaaacgagttcagtcaaatgcaggtggcacaaatcatgtacttgtaatgcccgatgctggcttggatgcgactttagatgcccttgttcctgctggctttggtgctgcaggagagaggtgc

SEQ ID NO: 12483 - DNA, 265 bp, Glycine max
  Clone ID: 701065830H1
gcccaaaacctctgcactcatccactgttgttcatgttgctaccgaagcgttggattcatcccctgatcccttggacccacctccagaaacccttgatgatgactctgacgccaccacctttgaggttggtgacttggggactcctagcacttcagcaattagcattggtggcgatgcagatacaatggcaccaaagcagaagattagaatcaagcttaggtcttactgggtgcccttgatagaggattcctgcaagcagatatt

SEQ ID NO: 12484 - DNA, 265 bp, Glycine max
  Clone ID: 701065831H1
aattcagcaattctcactagattgaagaattagcaaagatatacctagcagagaagctaaagggtacctaacttaagattctgttcactaggcttcagattctgttcagcaacaagctcattgcatcacacaacatcatggccagtggaccaaagatagtgcacatcgaaacacggtacgtggaaaccgacgctatacacttcagagatgtggttcagcacctcacagggaagaactcctcaacaacaaactgggtaggaaatgg

SEQ ID NO: 12485 - DNA, 264 bp, Glycine max
  Clone ID: 701065832H1
cagagaagcaagcggctcttgccgtcactccctctgatgctgatgctcctaccatatttgacaagatcatcaataaggagattccttctactgtggtttatgaggatgacaaggtgcttgccttcagggacataactcctcaagctcctacacatattcttatcattcctaaattcaaagacgggttaagtggtctatccaaggctgaggagaggcactttgagattcttggccgccttctgtacactgccaagctggttgcga

SEQ ID NO: 12486 - DNA, 90 bp, Glycine max
  Clone ID: 701065833H1
aacatggcttccttaagctcgttagtgctgctccttgcagctctaattctatgccctcaagttcttgcaaactatgagaatctcccagtg

SEQ ID NO: 12487 - DNA, 280 bp, Glycine max
  Clone ID: 701065834H1
cttcccttctccaacatgccaaacgacagcgttctcagtcttttcttcttcgttaccctcttcacatgccttctctctgctaattcccacgatgaccatattttcctaccgagtcaactccatgacgatgactcagtgagttgcactgctaccgacccaaaccttaactacaagccggtgatcggaatcctgacccaccccggcgacggtgcctctggccggctcagcaacgccaccggggtttcttacatcgccgcctcctacgttaaattcgtggagt

SEQ ID NO: 12488 - DNA, 276 bp, Glycine max
  Clone ID: 701065835H1
tgagcagcttctcttctttgccacccttgtgtggaggcacttatttggcagcaaaaatggtgggaattcaccctcaatgaagaagccttacattcctgactacaaactagcctttgagcacttttgtgtgcatgctgcaagcaagaccattcttgatgagcttcaaaggaacttggaactgagtgacaagaacatcgaagcgtctagaatgacgctgcatcgctttggcaacacctctagcagcagcatttggtatgagttggcttacatggaagc

SEQ ID NO: 12489 - DNA, 274 bp, Glycine max
  Clone ID: 701065836H1
tcctcggcggcgcaggggagagaggattgacgattgaggggaagttcataaagttcacaggcataggagtatacttggaggataaggcggtgccatcactcgccgctaagtggaagggcaaaacttcagaggagttagttcacaccctccacttctacagggatatcatttcagggccgtttgaaaagctaattagagggtcgaagattctgccattggctggcgctgaatactcaaagaaggtgatggaaaactgcgtggcacacatgaagtc

SEQ ID NO: 12490 - DNA, 270 bp, Glycine max
  Clone ID: 701065837H1
tgatcgagataactagaaacagtgtgatgaaaatgaaggtccttgttttcttcgttgctacaactttggtagcatggcaatgccatgcgtacgatatgttccctctccgaatgaacactggctatggtgcccgtactccggaggtgaaatgcgcaagttggaggcttgctgtggaagcacacaacatctttggctttgagaccattcctgaagagtgcgttgaagcaacaaaggaatacatccatggcgaacaatatagatcagactcca

SEQ ID NO: 12491 - DNA, 248 bp, Glycine max
  Clone ID: 701065839H1
agtttaccgtatgtcattatagtttccaaaggcacgcagcgagtttaggcgcggcgggatcatcacgagattgcaaaatgaagttcaacattgcaaatcccaccactgggtgccagaagaagctggaaatcgatgacgacctgaagcttcgggcattttgggacaagaggatctcccaggaggtccttggtgacgccctgggtgaggagtttaaaggatatgtctacgaaatcactggtgggtgtgac

SEQ ID NO: 12492 - DNA, 271 bp, Glycine max
  Clone ID: 701065840H1
agctgctgttcttgcgcgtgaacaagcctcaggtaagccaaaaccatggttaagcataacaatgttatcccaaacggacacttccgtaagcactggcagaactatgtgaagacttggttcaatcagccagcacggaagacaaggagacgattggctcgtcagaagaaagctgtgaagatattccccagacctacggctggacctctcaggcccattgtacatggtcaaactttgaaatacaacatgaaagtgagaggtggaaggggatttt

SEQ ID NO: 12493 - DNA, 266 bp, Glycine max
  Clone ID: 701065841H1
ccaaagcaatggctacttcaaagttgaaaacccagaatgtggttgtatctctctccctaaccttaaccttggtactggtgctactgaccagcaaggcaaactcagcggaaactgtttctttcagctggaacaagttcgtgccgaagcaaccaaacatgatcctccaaggagacgctattgtgacctcctcgggaaagttacaactcaataaggttgacgaaaacggcaccccaaaaccctcgtctcttggtcgcgccctctactcc

SEQ ID NO: 12494 - DNA, 269 bp, Glycine max
  Clone ID: 701065842H1
cagactaggagctgcccaaaattgctctgccactcttaacggcaaccacaagctcaccgatgctgttcttcctccaacgaaagactggagaaaagaaggtatagtgagttcagttaaagatcaaggcagctgcggatcatgctggacattcagcacaactggggctttagaagcagcctatgcacaagcatttgggaagagtatctctctttctgagcagcagctagtggactgtgctggccctttcaacaactttggctgccatggtg

SEQ ID NO: 12495 - DNA, 265 bp, Glycine max
  unsure at all n locations
  Clone ID: 701065844H1
agggtttacagagaagcgaagaggcgcacgngagcagtaactcgtggaattgctagcaatggcgaggatcaaggtttacgagctgaggcagaagacgaaggctgatctgttgaatcagctgaaggacctcaaggccgagcttgccttgcttcgtgttgctaaggtcaccggcggtgcacctaacaagctctctaagatcaaggtggtgaggttgaacattgcccaggttttgacggtgatttctcagaagcagaaggccgcgttg

SEQ ID NO: 12496 - DNA, 264 bp, Glycine max
  Clone ID: 701065845H1
gggtttcttcggctgcgtgctgatgctcttgttttctcacagtcacacaacagcagtgggaacaatcacagatggagtgaacaacatcaacatctctgattcttacaagaagaatcgcattcaggtctccaacaccaaaaatcctctcttcttctacgtcaatctcgccaagaggtatatgcagcagcataatgaggttgagctctcagcactaggaatggctattgctacagtggttactgttgctgaaatcttgaaaaacaa

SEQ ID NO: 12497 - DNA, 262 bp, Glycine max
  Clone ID: 701065848H1
cggctcgagtggagacaaagcagtgatgtgtcataggctaaatttcagaactgcagtattttactgccatgaagtccgtgaaacaacagctttcatggttccattggtggctggtgatggaaccaaaactcaggcacttgctatttgccactcaaatacttctggaatgaatcatcaaatgcttcatcaacttatgggagttgatcctggaactaaccctgtttgccatttccttggaagcaaggccattttatgggtacca

SEQ ID NO: 12498 - DNA, 279 bp, Glycine max
  Clone ID: 701065849H1
cagagagaaagtaggagacaaaaaaaaaagcctcaccgacttcggcgaaatggatctgccgccggcaccgatccggtggcgcgcaaccgcaatcccattctttgtggcggttctctttgtatccaccatctccccttcgcgcgcaatctactgcgacgaagatgattgctacgatctacttggggtttctcaaagtgccaatgcttccgaaattaaaaaagcttactacaagctctccttgaagtatcacccagatgaaaaccctgatccggaatcgcg

SEQ ID NO: 12499 - DNA, 278 bp, Glycine max
  Clone ID: 701065850H1
gcaatgcaaaggaagatcctcgcttctaccgctgctgctgaagcattagaggaggccaatgctactgaatgtattataagaaatttaagcatgttttcagacctctgctcagtttgccaggccaggaatcctttgccaaccatagacagattcttcactatctatgatgatgttctgaaatcaactgcaatggttgaatctgttgccagcagacataattctgagacacctgatgaaggcattccaacaaaacactcaaaatcactttctttttgggt

SEQ ID NO: 12500 - DNA, 222 bp, Glycine max
  Clone ID: 701065851H1
cggctcgaggcttccttaagctccttagtgctgctccttgcagctctaattctatcccctcaagctcttgcaaactatgagaagtacccagtgtacaagcctcccactgagaaaccaccagtttataagccaccagttgagaagcctcctgtttacaagcctccagttgaaaagcctccagtttataagcctccagttgggaagccaccagtgtacgagccc

SEQ ID NO: 12501 - DNA, 271 bp, Glycine max
  Clone ID: 701065852H1
ctggttttctcttcctcgttcgtttcatttcgtttcgttgaagagcaacttttctctctctgtctctgtacaattctcccttttcttccctcgtagatcgaaagggaatattcttccatggcctccaagcggattctgaaggagctcaaggacctacagaaagaccctccaacctcttgcagtgccggtcccgtagcagaagatatgtttcattggcaagcaactataatgggtcgccctgatagcccttatgctgggggtgtttttctag

SEQ ID NO: 12502 - DNA, 99 bp, Glycine max
  Clone ID: 701065853H1
cttggcatcgcttctcctctctcccaagaaagaatcatcaatggacatgaacacgaagacgatctcaaagacggaaacctcgacttcgcgagagatcgc

SEQ ID NO: 12503 - DNA, 265 bp, Glycine max
  Clone ID: 701065856H1
gggaagggacggagggagtaatgttgagctggcgttttatgattgggtgttagttttgcagcgcatcgagttgcgtgcacaagcacaacgctgtatgggtatcctacccttgcaactagttctatccaccaatagaatttcgtctagaaaaatttacacaatattttaagacgcacataaacttcctctgtcactacccactcctctctctgtctccgcctttcgcattgcaagcggtctctttctttgcttttccttccccctt

SEQ ID NO: 12504 - DNA, 265 bp, Glycine max
  Clone ID: 701065857H1
caacaacattcatgagggtactcattaaaacattacaaatatagacatagagagagagatcgtgtgaaggggtggcgatggagaaggcattgtggaggtcgaagtacgtggtttccggaggggggttgaagtggatggtgtttgtggtggtgtgtgtggcgtgcgtggtgggaatatggccgtgttatccagagctgaagatcgagagaatggaagtgaagcgggtgaaggtgcggccggtgccgccggtgggggcggacgtgtc

SEQ ID NO: 12505 - DNA, 175 bp, Glycine max
  Clone ID: 701065858H1
cggctcgagggaaatctgaaatccctgactagtcttcaactcagtggcaatctgctcacagggactattccactgtccatatcaagattacagaacctttggtaccttaatgtatcaaggaattgtctttcagatcccttaccagtgatcccttccaagggtatccctgcccttt

SEQ ID NO: 12506 - DNA, 263 bp, Glycine max
  Clone ID: 701065859H1
gttccaatacggaatctaaggcaaagcaaaccaaacatcttgaatcatgggttcaacaggtgagactcagattaccccaacccacgtatctgatgaagaagcaaaccttttcgccatgcaactagccagtgcttctgtccttccaatgatcctcaaatcagcacttgagcttgatctgttggaaatcatagccaaggctggccctggtgttcatctttcccccactgacatttcttctcagctcccaacacagaaccctgatg

SEQ ID NO: 12507 - DNA, 259 bp, Glycine max
  Clone ID: 701065862H1
cagaaaacagcatcgaacccgtcgtagcagaaaaacttgtcaccatggtttcttccgacaaggatccacgagaggatgtccttcaagcctggtacatggatgatagtgatgaagatcaaagactcccccaccacaaagatccttttgagtttgtctcgttggaccaacttgctgaacttggagtccttagctggaaactatatgctgataaccatgaaaatgatccagagctgaagaagattcgtgaagagcgtggtta

SEQ ID NO: 12508 - DNA, 128 bp, Glycine max
  unsure at all n locations
  Clone ID: 701065863H1
atctctgcagcaatgaacctggtcgattccaagaaagagagtctcganaaagccttcgacgatctccaatcccttttctctcccctccctctctcatggtccgacctcgattcccacttcaccaccgt

SEQ ID NO: 12509 - DNA, 263 bp, Glycine max
  Clone ID: 701065864H1
aaactttgaagggacacctttgtttcccagtgatcctgccaagaaagagttcggtgagcaattgatatcccatgttgatacattcagcaaagacctgttcgtttcattgaatcgggatgctgtacagcaagccagtcccgcttttgaatacttggagaatgctcttggtaaatttgatgatgggccattcttgcttggccaattcagtttggtggatattgcttatattccatttgttgaaagattccaaattgtctttgctg

SEQ ID NO: 12510 - DNA, 263 bp, Glycine max
  Clone ID: 701065865H1
ctccatccaacatcgaaacaaggtcgttttgtgttccgccgaagacccggacgttgtagcaggctagcagctatggatttggcatccaatctcggtggcaagattgacaaagccgaagttctctctgccgttcagaagtatgagaagtatcatgtttgctatggaggtcaagaggaagagaggaaagctaattataccgatatggttaataaatactacgatcttgttaccagcttttatgagtttggctggggggaatcttt

SEQ ID NO: 12511 - DNA, 274 bp, Glycine max
  Clone ID: 701065866H1
aacacaagtctccgtttggttggcatcaatcacatccggcatgggtgcaggtcaagctatgaaaagaatccctcgcatcaagttccctcagagacatcccaaaccttcttctggttctacacctgagactcaagcttcgtcttcaacaactgatgtcagtctagcgttcttttcaagttcaaatgcctcaacctcagttggagggaaggcctctcttcaacccaaaagaactccagtgtccaaagaggagattgaggcaattttgttgggtggc

SEQ ID NO: 12512 - DNA, 273 bp, Glycine max
  Clone ID: 701065867H1
taatcatttccagatttctgaggatgggttactattgctataaacgcaattatagtactcatacatcagatgttattgtgatgttggcggtggccttgatgcttcttggcataccttggctctttacgcgtgaacaagtggtggtagttgaagaaaagaagacgaattggtcagctttgatcacaccaatactagtactactcatcttgcttttgctgtcactgattggaactcccaggagggtttatgcaaagccaacgtgctatcggtgga

SEQ ID NO: 12513 - DNA, 260 bp, Glycine max
  Clone ID: 701065869H1
cttgacagacaatggcggtgcctctgctctcaaagaagatcgtgaagaagagggtaaagaagttcaagaggcctcagagtgacaggaaaatttccgtcaagactaactggcgcagaccaaagggtatcgattctcgtgttaggagaaagttcaagggatgcactttgatgccaaacattggttatggttcagacaagaagacccgccactatctccctaatggtttcaagaaatttgttgttcacaatgtgaaggatttg

SEQ ID NO: 12514 - DNA, 257 bp, Glycine max
  Clone ID: 701065870H1
gaagaatccaaacaggtgtgtcgtggaagatgagtggtgccgttagggctgcattgaaatccaccactagtgtttgtgcacttgcgcagagaagccatggcctcctcccaatgaggtgcttctccactgaggcagaacagccacctctgaattcaacgccccgccctcctccgatctttgagactgaccattcaggtttgacatatggtaatctgctcggcgttcgtagacatgcactgagaacagatatcatcaac

SEQ ID NO: 12515 - DNA, 268 bp, Glycine max
  Clone ID: 701065871H1
cacgccgtcgtcgctgtttttgtgtgtcgctatcgcgtaggtgcagctgcaatggtgaagggacgccaaggagaacgtgtcagactctacgtgaggggtacaatccttggatacaaaaggtccaagtcaaaccagtatccaagtacatccctgatccaaattgagggtgtgaatgccaaagaagaagtagcatggtatgctggcaagaaaatggcctatatctacaaggctaaggtgaagaagaatggaagccattaccgctgcatat

SEQ ID NO: 12516 - DNA, 172 bp, Glycine max
  Clone ID: 701065872H1
agttgttgttggaagccaaaaccctagcagccggcgagaatggcagacgttgaggttgatgtggcggcggcggcggcggcggcggctgcagggcagccaaagaagagaacgttcaagaagttcagcttcaggggggtggatctggacgcgcttctggacatgtccactgacg

SEQ ID NO: 12517 - DNA, 263 bp, Glycine max
  Clone ID: 701065873H1
ctgagtttccacactgcataccttaggtcttccgaattcgaagttaatttgcaagatggctaaggaaaaggctcagatcaacattgtggtggttggtcatgtggaccctgaggaggcaaccaccattaacgagctgaagaagcctgttgtggagaaagaagctccagggcatgccatatgagggcatgcacgtacggcctcggaggggaaccagaaaattatgttaacaaaataatctggaaccctaatgtatcagtgtcatc

SEQ ID NO: 12518 - DNA, 266 bp, Glycine max
  Clone ID: 701065874H1
caaattacatagcctcagtaatctgagagagaaacaaaaacaatgaaggtttccattgccaagttccactcccttcccctatgttttttccttctcttggccttcaacacaaaacccctcctagcagcagaaccagagccagtggttgataagcaagggaaccctttggagccaggagtagggtactacgtgtggccactttgggctgatgaaggaggcctcacactaggccaaacaaggaacaagacatgccctctttatgttat

SEQ ID NO: 12519 - DNA, 262 bp, Glycine max
  Clone ID: 701065875H1
gtgaagagagaagaagatggcgtcgagcggagcgatgccgttttggagggcagcggggatgacatacatcacatactcaaacatatgcgcgaatctggtcaggaattgcctcaaggaaccctacaaggctgaagccatctctcgtgagaacgtccattttgctctctccaaatgggtcgacgccaagcctgaaaaacctactattcgttcagacaccccagagcagtgatccggaatagttggaagctataaatgcataaat

SEQ ID NO: 12520 - DNA, 261 bp, Glycine max
  Clone ID: 701065876H1
cggctcgagcaagctagctaggttgaaaatagtttggttttgtagtaagtgaggtgaggtgccacaatggtgaagataactcttggtactttcgatgactcttttggtgttgcctctcttaaggcttatttggcagagttccatgcaactctgattttcgtgttcgctggtgttggttcagccatcgcttacaacgagcttacaaaagatgcagccttggatccaacggggctggtggcagtagctgtggcccatgcattt

SEQ ID NO: 12521 - DNA, 262 bp, Glycine max
  Clone ID: 701065877H1
gctccttctctcatcactcatctatggctacctttccctcccctccttcaccatcttcttcttcttcaattccgtctccaagatctagaatgttttactatgctggaagtgaagaccactatgaggagcctcacttcctccaagcttgttttctttgcagaaaaccactaggccaaaatcgtgacatcttcatgtacagagggaacacaccattttgtagcaaagagtgcagacaggagcaaatagagattgatgaggcaaa

SEQ ID NO: 12522 - DNA, 263 bp, Glycine max
  Clone ID: 701065878H1
ctttcatcattcatcgcctttcaccacgcacgcagatcctttattacctataatccttccttcgctctctccaaatttcgactctttcgatcagatccgcgacacccaccccaccaaaaccttgcgcaacccatccatgacgcttggctcaggaggatccagtgtcgttgttcctaggaacttcagattgctggaggagcttgaacgtggtgaaaaaggaattggagatggcacagttagctatggaatggatgatggtgatg

SEQ ID NO: 12523 - DNA, 261 bp, Glycine max
  Clone ID: 701065880H1
cgcaattttacccaacaaaactctctctctttctctcactttctaataatggagagcctcccgcttgagacggcggagaagatcatcctgcgctgggactccaccgcgtcggaggatgcccgcgacaagatgatattctccggcggcgtggaccgcgatgaggccgatctctacctccaagccgtggacgaaatccaacggtccctctcctccgtctccgtctcctcctccgacaaagtcaactccgccatccagattgcc

SEQ ID NO: 12524 - DNA, 277 bp, Glycine max
  Clone ID: 701065881H1
gtgagtttgttgatcgagataactagaaacagtgtgatgaaaatgaaggtccttgttttcttcgttgctacaatcttggtagcatggcaatgccatgcgtacgatatgttccctctccgaatgaacactggctatggtgcccgtactccggaggtgaaatgcgcaagttggaggcttgctgtggaagcacacaacatctttggccttgagaccattcctgaagagtgcgttcaagcaacaaaggaatacatccatggcgaacaatatagatcagact

SEQ ID NO: 12525 - DNA, 257 bp, Glycine max
  Clone ID: 701065882H1
attgcatacagttatactttggtttgcgtttacggtacagtcaatggatcctcaggtttggcacaaagttgcagcgatttcaggagtggcagcacttggattgggaacctatggtgcccacgtcttcaagccccaaaatcctgcttacaaagatgtttggcacacagcttcgctttaccatttggttcacacagctgccttagttgccgccccaattacaaaacaccccaatgtttttggaaggcctctaacagcgg

SEQ ID NO: 12526 - DNA, 275 bp, Glycine max
  Clone ID: 701065883H1
gcaagaatggcacttcgttgcttggtgatgtccctttctgttctcttcactcttggtcttgcgagagaaagccatgccagacacgaagatttttggcatgctgtttggccaaacactcccattccaagttcattgcgagatcttctaaagcctggccctgcaagtgtacgaaatcgatgatcaccctatgcaaattgaagaaacacagtacccgaaaaccttcttctataaagaagaccttcatccaggcaaaacaatgaaagtacaattcagcc

SEQ ID NO: 12527 - DNA, 226 bp, Glycine max
  Clone ID: 701065884H1
ctctgaaacttttctcttctctttgattcttctctatcagttaaacattagaatgagccgttcacaggatccacacccttcccgatctttcttcccttttggaaatccttttcggatgatatcacctaaaggtctcgcatgtctcaaaaatttcttgaagtgttgaagcttttgaaggaacaattggaaaaaaggctgaaaatcctaatgctaaaagccaaggttg

SEQ ID NO: 12528 - DNA, 265 bp, Glycine max
  Clone ID: 701065885H1
gtttgttgttgtaactcgttcttcttcttttgttgttctgtgtttgtgtttgtcttttctctcacctgaaaatgtcttgctgcggtggtaactgtggttgcggaagctcctgcaagtgcggcaacggctgcggaggctgcaagatgtacccagacttgagctacactgagtcaaccaccaccgagaccttggtcatgggagtggcacctgttaaggctcaatttgagggtgctgaaatgggtgtgccgctgagaacgatggctgc

SEQ ID NO: 12529 - DNA, 127 bp, Glycine max
  Clone ID: 701065887H1
gccatttaaagcagagacaataatatgtgtgtgggaatagagaatagagaagtttcttttaaggatgaattacactccatgtaacttctctggagttttaattcatcagttatttccacacaacata

SEQ ID NO: 12530 - DNA, 268 bp, Glycine max
  Clone ID: 701065888H1
aaatcttaaaaatattcagtgaagatcaacctcaatggcatctcttggcgtgcgaccagttcttccccctccattaacttccatctccgacccacctcctcttttcgatggcaccaccaggttgtacatcagttattcttgcccctatgcacaacgtgtgtggatcgctaggaactacaaggggctacaagataagatcaatttggtccctattaaccttcaagacaggccagcttggtataaggagaaagtctaccctgaaaataag

SEQ ID NO: 12531 - DNA, 267 bp, Glycine max
  Clone ID: 701065889H1
cactaactaaagccgagcagcgagagagagaaaccctagcaaaaatgccggctggtcacggtttgagatcccgcaccagagattccttctctcgtcccttcaggaagaagggtaccatcgccctcaccacatacctcagaacctaccacgtcggcgattatgtcgacgtcaaggttaacggcgccgtccacaagggaatgcctcacaagttctaccatggccgcaccggtcgcgtctggaatgtcaccaaacgtgctgttggggtcg

SEQ ID NO: 12532 - DNA, 266 bp, Glycine max
  Clone ID: 701065890H1
ctccgctttcacttcttctctctcaccctccaactatgagttactacaaccacgcagcagccacccgtcggtgttcctcctccccaaggttacccaccgccggaatcttacggaaaggacgcgtaccctccgccagggtaccctccacagggaggataccctccgcaggcgtatccagcacaggggtaccctccaccctacgcgcctcctcagtacgctcagcctccgccgcaacaacaccagaattcatctggcccgggttgctt

SEQ ID NO: 12533 - DNA, 262 bp, Glycine max
  Clone ID: 701065891H1
tcgaaacgaggtcgttttgtgttccgccgaagcaccggaggttgtagcaggctagcagctatggatttggcatccaatctcggtggcaagattgacaaagccgaagttctctctgccgttcagaagtatgagaagtatcatgtttgctatggaggtcaagaggaagagaggaaagctaattataccgatatggttaataaatactacgatcttgttaccagcttttatgagtttggctggggggaatctttccattttgcac

SEQ ID NO: 12534 - DNA, 258 bp, Glycine max
  Clone ID: 701065892H1
gttctgagaaatgttgaatagttgaaaattcagtttgtcatttttatcttttatttttcctccttttttggtctttgttatatgtcactgtaaggtgaagcagttgttcttgcatggttcgcaagttaagcagttaggggcagctgtagtattagaaatggtatttttttttttggtttcgcttttctctgtggtagtgatgtctgtcgaagtataagtaaacgtttttttttctctggacattttgatgataaagaa

SEQ ID NO: 12535 - DNA, 260 bp, Glycine max
  Clone ID: 701065893H1
gcttctctccacgcccttcttgggtaatctgaagtgcagcggtggcggatggattgcactcgcggcatccatcagtagttcagaagttatctggacagtcttatttgttgtctaggcttgcccctactcactcaagaaactattccacaactggtagttacttcaatggaggcttgcagtcttcgggtttggttccagtcatggcacatgcaccggctgagaaaggagtgtctggatttttgttggatttcatgatggga

SEQ ID NO: 12536 - DNA, 262 bp, Glycine max
  Clone ID: 701065894H1
gagtcctgaaacttgggtgcgattccttcactcacaacaacaacacatcactatggctcttctgagtcgagcctcttcacgcttccctcagctggtttcccctcaaagggtagtttcactccacacaacgctcccatacactgaacgcatccccatccacagccacgcctacaccatatgccccgccaccgcctccgtccgcttcctctcccgccggcgtttcgaaggcggcggagttcgtgatctcgaaggtggacgatct

SEQ ID NO: 12537 - DNA, 244 bp, Glycine max
  Clone ID: 701065896H1
acttactggaagccttgttgtgagtaagagaaaaggcttcctgcaccgagcacaccaacttgatacctctgattctttctttgcttagaattccacagaatatggagaatattcttttcaatcactccccacctttggaattcaagggtttgagcaaggaggaggaagactcattgctagggcaagtggaaatatggaggtacatgacatgcttcacggactccgtggccttgaaagctgtcat

SEQ ID NO: 12538 - DNA, 109 bp, Glycine max
  Clone ID: 701065901H1
cagagaaattgagtttctgagataaccacttttctctttgattcatcaatggcaaccgcgaggaccgtgaaggatgtttcgcctcacgatttcgtgaaggcttacgcct

SEQ ID NO: 12539 - DNA, 108 bp, Glycine max
  Clone ID: 701065902H1
cttgcagaaacaccaattatcagtcttgttaaatcgacaaatgtgcatcaaatgctagcataagtatgagagacgtacctatgtattcattattgtggaaatttagta

SEQ ID NO: 12540 - DNA, 251 bp, Glycine max
  Clone ID: 701065903H1
tgaagatgtcgactccggctaggaagagactgatgagggattttaaaagattgcaacaagatcctcctgctggcatcagtggggctccccaagacaataatattatgctttggaatgctgttatctttggcccagatgacaccccttgggatggaggtacgtttaagttgacacttcagtttacagaggattatcctaataaaccacctactgtgcgctttgtttctcgaatgtttcatcctaacatttat

SEQ ID NO: 12541 - DNA, 199 bp, Glycine max
  Clone ID: 701065904H1
cagagcgagcagtttcagacacagagagaggggtttcgcattggagggattgacgctgcgtctcttcctcttctctttcgatccatccctcattcctaatcctccaatccaaccacctcagcctcacactcacatatacacatatctgaacgcgtatcgtccctcctatggcttcaaagcgcatcctcaaggagctcaa

SEQ ID NO: 12542 - DNA, 197 bp, Glycine max
  Clone ID: 701065905H1
cgaggtgtttcagcagctgtctcaaaaactgctgctgctcccattgaacgtgttaagcttttgatccagaaccaggatgagatgatcaaaactggtagactttctgcgccctacaagggtattggtgattgctttaagagaacaatggcagatgagcgtgttgtttctctatggagaggaaacactgcaaatgtcat

SEQ ID NO: 12543 - DNA, 97 bp, Glycine max
  Clone ID: 701065906H1
ctgtatagcatctttaagattttccacagcttatgttataaaggactctatcttcggacagaatttgtgattaatagtttgatactattactcagaa

SEQ ID NO: 12544 - DNA, 215 bp, Glycine max
  Clone ID: 701065907H1
agcgcctcttgatagggtctcccattttcaattgcttctcagtttccttttctctgaaaaaagatgttgagggttgcagctaggaggctctcttctcctcgtctctctccgtgcgccaatacgcgctccgtttctcctgaacgacgcgcgtcgatgacaagacgttctctccatccttctcttcgagttgtatgacctgacaccatgaaagatat

SEQ ID NO: 12545 - DNA, 230 bp, Glycine max
  Clone ID: 701065908H1
cttgggagcagaggtcgagtttcacagcagcaatggtgaacgtcacggctcagaaatcaaaagcctacttcaagacatatcaagtcaagttcaagagaagaagagagggaaaaaccgattaccgtgccaggattcggttgattaatcaggacaagaacaaatataacactccgaaataccgatttgttgttcgctttagcaacaaggacattgttgcacaaatactatct

SEQ ID NO: 12546 - DNA, 126 bp, Glycine max
  Clone ID: 701065909H1
cgtgggtgccaacaatgtgaagatttttcttaatggggaggataatcccaggtacaatggacctggccgtggagccagcactcactacttcaagtttggggtttacgcacaggatggtgcttccaa

SEQ ID NO: 12547 - DNA, 266 bp, Glycine max
  Clone ID: 701065910H1
ctctctagtgtaagactcatggattggcttagacgcagcctatctaggggttcaaggaatagcaaaaccccaaatatccaaacgcagtccaactccgaagtacagcaacacctagaagaaagcatatacgggattaccgaggaactcatcaaccacatcaagaccttcacccttgacacctttaagaatttccctctccaagatgaagttgaaggcagttatggggaagacactcaatcctcttcaaccaaagtccgaaatgaact

SEQ ID NO: 12548 - DNA, 265 bp, Glycine max
  Clone ID: 701065911H1
cattgcaagactggcacttcgttgcttggtgatgtcctttctgttctcttcactcttggtcttgcgagagaaagccatgccagacacgaagatttttggcatgctgtttggccaaacactcccattccaagttcattgcgagaccttctaaagcctggccctgcaagtgttgacatcgatgatcaccctatgcaaattgaagacacacagtaccggaaacctctgtccaatacagcagccttcatccaggcaaaacaatgaacgt

SEQ ID NO: 12549 - DNA, 266 bp, Glycine max
  Clone ID: 701065912H1
ctttgttgtgagctataagctagtttatcgtgaggagaatatgaagttgtttgtcttctttgttgctgcagtagttctcgtagcatggccatgccatggcgcaggctaccaaaggttccctctccgaatgaaaactggctatggtgagcgttcttcggaggtaaaatgcgcaagtcttaggcttgctgtggaagcacacaacatccgagaccttaaaaccattcctgaagagtgcgttgaaccaacaaaggactacattaatggcg

SEQ ID NO: 12550 - DNA, 268 bp, Glycine max
  Clone ID: 701065913H1
ccaaagttgcagagaaaagctgaggtgaatcgtgtgcagaaccttgtggataaattagattctctaaaggcaaggaacgccaacccttttagcaacagtagcaatgctgtcaaagtaacaacccaatgggaaacctttgactctggaatggaaagcttggatgctccatccgataacccgtcttccacaaaagtaactcaagaatgggagcggtttgattagctcggaaaccgtttttggaacatctaagttataaatgttgtacaac

SEQ ID NO: 12551 - DNA, 112 bp, Glycine max
  Clone ID: 701065914H1
cggtgggtggtgtgattgagtatgagcatgaatagtctcctagcaagcacgcgtgcttcttcttctccattataccaacactcttccaccttgacactcagacaaccccatt

SEQ ID NO: 12552 - DNA, 97 bp, Glycine max
  Clone ID: 701065915H1
atttattctagtaatacatttctgggttttgtttgccttgtgtgtatctttctattgacgagaataatggaatgttcccaattctctgtttttttgc

SEQ ID NO: 12553 - DNA, 269 bp, Glycine max
  Clone ID: 701065916H1
cgaatggctttcctttgaaggttgttggggacactaactcttttgactctacttcagagctaactgtgaatcaaagtttcgattactacactaaaaatgacagcagtaaggagtacaatggtccctatgacttaactatcaaagttactgaaaaaggtataccaaaaggaagatatggcacaggggagcttgtttacttgggttagcgatgatgtattcagaaagcctacatttgcccgttttctttcacttttagataattacaatcc

SEQ ID NO: 12554 - DNA, 102 bp, Glycine max
  Clone ID: 701065917H1
caaacctaagagggtttaacctcgtttccttaatccattctttgctccctcgaactgctgtttggtctcttcactcttatccatggcatcaacgtttctcac

SEQ ID NO: 12555 - DNA, 100 bp, Glycine max
  Clone ID: 701065918H1
ctcgagccgctcgagccgcttctcttgcggctagggttttagcgcagttcttctagatttcaggaagaaccgtaaggaaaaggttcacatcagtattgtg

SEQ ID NO: 12556 - DNA, 206 bp, Glycine max
  Clone ID: 701065919H1
cttcttcaaattcctgtcctgaagatgacagcaaagtggtatctcattgtgtgtgttgtagcgatctgggccgttgatctgggttcatcatcacaccatgcccgtgccccagcaccagcaccgtcagtggagtgttcaaacctggtattgaccttatcggattgcctcaccttcgttagcaacggcagcaccgtcaccaagccaca

SEQ ID NO: 12557 - DNA, 221 bp, Glycine max
  unsure at all n locations
  Clone ID: 701065921H1
cgccgacttagacctgacctgggcttggagtaaacagagaagaaaatattccatacaacatgcgatattaagaagagaagagaagagagggggaatgaacngattcgagtccgatggcctctacagagggcctggtgcccataactagggcctttctggctgcttattacgactaacacccttttactcctctttctgctcatgtctccacacaatctact

SEQ ID NO: 12558 - DNA, 151 bp, Glycine max
  Clone ID: 701065922H1
aaacaaatcaaagccatggccacctccaacttctctattgttctctccgtctccctagccttctttttggtgctacttaccaaggcacactcgaccgataccgtttctttcaccttcaacaagttcaacccagtccaaccaaacattatgc

SEQ ID NO: 12559 - DNA, 274 bp, Glycine max
  Clone ID: 701065924H1
agcaactgcgattttggatcggaacctcttctgcggcgtacaacgcggacactccaacgtttggaattctcacccaaaaaactacggtcctggttctcgcacttgccgagtgtgtgggaatccacatggactcatcaggaagtatggccttatgtgctgcaggcagtgcttccgtagcaatgccaaggaaattcgcttcatcaagtatcgctaaaagagctgttgtcacctacggaccaatattatgttctggcactaggatgttactgaagat

SEQ ID NO: 12560 - DNA, 272 bp, Glycine max
  Clone ID: 701065925H1
ataacattcacattcactagagaggaagataaagttataggaaaaatactgctatacagaggagatggcttgcagggtgcagaaaaggatttcactgcgcagaaaacttcgcattgtgcgagtacttacctgctcaaactctgccaagagaacctcccttgtcaagagtaccgttctacgcttatacaaactaaagctcgcactggaaactgtcaaaagacagtatgaaaacctgttagccaccagaagagagttcattagcctatcgaacc

SEQ ID NO: 12561 - DNA, 242 bp, Glycine max
  Clone ID: 701065926H1
ctcggcgcggcacccacacacacagttcgttcggaatgggaagggtgattcgcgctcagcgtaagggtgctgggtctctgttcaagtctcacactcaccaccgcaagggtccggcgaggttccgcagcctcgacttcggcgagcgcaacggctacctcaagggcgtcgtcacggacatcatccaggaccccggtcgcggcgcccctctcgccaaggtggcattccgccaccccttcggctac

SEQ ID NO: 12562 - DNA, 268 bp, Glycine max
  Clone ID: 701065927H1
ctcgagcgccggtttcccagatctgctccttcctcaccccacagacgtcagttgaagagcacgggtcgtggagttagcagtggtggtggtcaaagttccttgggttatctttttggcagtggagaggcccctgccgcaaaaccggcaacaaacaatgccccagccccacctgaagtgcaggctgtaaataatgcgcctccttcaaaagcatctcctcctactaaaacaatagaccctaacaagcgcgctggtataaacagtcattcta

SEQ ID NO: 12563 - DNA, 144 bp, Glycine max
  Clone ID: 701065928H1
gctcgtgcctctagggttatcatatctccatttccatttcctctctctcagtttccaagaatcttaagctatgggaaagtcttacccaaccgtgagcgctgattaccagaaggccgttgagaaggcgaagaagaagctcagagg

SEQ ID NO: 12564 - DNA, 204 bp, Glycine max
  Clone ID: 701065929H1
cgcaacccctcttttagcgttcgaacaaaattagggttttctcaaccctagggtttaccttctcttcccatgttcgaaattcggcaaatcaaaacagaaacacgactacaaaaagaagaaaagaagaaaaagaatcaatcattcattgatcgctgaaacgatacgatgacagggaaggcgaacgatagaagcacacggcgagga

SEQ ID NO: 12565 - DNA, 264 bp, Glycine max
  Clone ID: 701065930H1
cctgctgctaagaaggccgcaggtggagacggagacgaggaagacgaggattagactgttcattatgtctttctctagtgctattagatcttatgccaccttttactttgcctacctaatcgattttggttgttatacattttcatcctttggttcccttgtttgagaaaatattaagtggtgacatattatgtttttgtgaatttggatattttaaagtatcaagattttccattaaataaaaaaaaaaaaaaaagggcggcc

SEQ ID NO: 12566 - DNA, 269 bp, Glycine max
  Clone ID: 701065931H1
cggtaacaaccctgacactccttcttctccgcttcgtcttcgatcatcgcttcagaatgccgccgaagttcgacccctcccagatcgtcgacgtcttcgtacgcgtcaccggcggtgaggtcggcgcggcgagttccctccccccgaagatcggtcccctcggtctctcccccaagaagatcggagaagatatcgccaaggaaaccgccaaggactggaagggcctccgcgtcaccgtcaagctcaccgtgcagaaccgtcaggccaag

SEQ ID NO: 12567 - DNA, 204 bp, Glycine max
  Clone ID: 701065932H1
aggggcaactcatctttgtcttcaattttcattggaccaacagctattcagattacagagttggctgctcaacccctgggaaataataagattgtcttggattcagatgatgccttgtttggtggcttcagtaggctcaatcacgctgctgagtacttcatcacaaagatggtatgatgaccgacctcgatcctttcttatcta

SEQ ID NO: 12568 - DNA, 118 bp, Glycine max
  Clone ID: 701065933H1
tccgcgactaccgctccaagatcgaggccgagctctccaacatctgcgacggaatcctcaaactcctcgacacgcgcctcgtcccctccgccgcctccggcgactccaaggtcttcta

SEQ ID NO: 12569 - DNA, 116 bp, Glycine max
  Clone ID: 701065934H1
caaagcatacccacaacacactgttttagtctttggttttctgtgtcactgttctcacataatctggtctcgcggtgctaagcacaaacatgtccaactcgagggtagctgtgaac

SEQ ID NO: 12570 - DNA, 98 bp, Glycine max
  Clone ID: 701065935H1
tcgagggataaatggtgtgagaatggagtgcaaagaggaagatgtatgggctggagtaactacgctctgggtagggcaacgaattggtacagcaggtc

SEQ ID NO: 12571 - DNA, 201 bp, Glycine max
  Clone ID: 701065936H1
acgctttgtgatctgcaagctacgatgggtaagggaacggggagtttcggtaagagaagcaacaagacccacaccctctgtgtgacgtgtggccgccgcagtttccacctccagaagagtacatacgccgcgtgcgctttccccgctgcgcgcaccaggaaatataactggagcgtgaatgccattaggagaaagaccacc

SEQ ID NO: 12572 - DNA, 224 bp, Glycine max
  Clone ID: 701065937H1
caagcccggctccagtgaaggaaaaggtccaaaaggagagtggcatcaggtccaggggccgagcaagaggcccggactcgattccaaaagctattattaagcggaagaagtctaacaattacctgatatgggctgcagctgccaccttgctagtcctcctgttggctgtgcttgggtacatctatcttttttgaaaagtttagatgtggaaggagctgcgaaac

SEQ ID NO: 12573 - DNA, 145 bp, Glycine max
  Clone ID: 701065939H1
ctcacttcaagggcaagtaccatgatgagctcattcgccaatgctgcttacattggcactcctggaaagggtattcttgctgctgatgagtcaacagggacaattggcaagcgtttggccagcatcagtgtagagaatgttgaat

SEQ ID NO: 12574 - DNA, 124 bp, Glycine max
  Clone ID: 701065940H1
atcgagataactagaaacagtgtgatgaaaatgaaggtccttcttttcttcgttgctacaattttcgtagcatggcaatgccatgcgtacgatatgttccctctccgaatgaacactggctatg

SEQ ID NO: 12575 - DNA, 263 bp, Glycine max
  Clone ID: 701065942H1
cattcctcaatttttttggccccagtttggaaatatgatggtggaaaagactcagtgttgcaagtgagcaaagagaactatgtgaattgcagcatctcaaaccccataaaggagtacaatgatgataccacaaaggttcagcttgagcatccagggccattctacttcatcagtggtgcaaagggtcactgtgagaagggtcagaagcttgttgtggtggttttgactcaaagagaggaacaaggttcactggttttgctgca

SEQ ID NO: 12576 - DNA, 267 bp, Glycine max
  Clone ID: 701065943H1
ctcgcattgaaaagcagcaccatcaccaccccctcgtcttccccccttctttcatagatatgcgtctctgcgacatgttcaccaccacctccttgttcacatcatcatcatcatcatcatcatcatcttcttcttcttcaatcagttgactcttcgttcctccctctattgatctgatggagcccatggacatcgttgggaaggccaaggaagacgcttctcttcctaaagcgacaatgacgtcaattattaaagagatgttgcccc

SEQ ID NO: 12577 - DNA, 181 bp, Glycine max
  Clone ID: 701065944H1
cgcgagacacagagagagaatggcagcacttggtggcaatcgtgatgtggcatgctgtcagatcagccatgatatcgatggtttagctcgctttgctgttgaagaacatagcacttgacagaatgcccttttggcgtttgaaaaggtagtaagtgcaacacagctagtggtttctggtacc

SEQ ID NO: 12578 - DNA, 254 bp, Glycine max
  Clone ID: 701065945H1
cggccaacaatggcgtccttcgatgaagctcctcacggaaacaccaagaacggcgagaatatcttcactaccaagtgcgctcactgcaacaccgtcagcaaaggtgccggcgtcaaacaactacccagatctgaatggtttgtatgacggacagctcaggtggaactcccggatatgccgactctactgctgacacatacatgaccgtagttcgtgaagaaaataggctctcgtgactacttgatcaaggccaa

SEQ ID NO: 12579 - DNA, 255 bp, Glycine max
  Clone ID: 701065946H1
caggcttcttttttttgtgtgtcatatggtattggaaaggatactgtataatgggatatccaattaattattatctgttgcaatctttcttgtgttacttccacagtcccacaacacatagggtcctaactcataagtgcccccattttaaaattttgggtcagcatctggtggtcctataggaactagaaatgtcattgtagcaacattattctcttggaaagaacatttttcattacagctataatggcgcat

SEQ ID NO: 12580 - DNA, 265 bp, Glycine max
  Clone ID: 701065947H1
cggttttccaattcacagagcaacacaacgaaccaacaatggcgcagctcagccgcagtcgcagccgcagcacgggcaagcagcgctggagcaggtgcagtgcttcggtcgcaagaagaccgccgtggccgtgacctactgcaagcgcgggcgcggtctcatcaagatcaacggctgccccattgagctcgtggagccggagatcgttgcattcaaggccttcgagcatatcctcctgttgggtaagagccgcttcgccggcgtc

SEQ ID NO: 12581 - DNA, 262 bp, Glycine max
  Clone ID: 701065948H1
aacggagttctctcgtcaggtcaccatctagactgtaatcatcgctgatggagcacagcatcgatcagttgttcagaagctagctggacagtcttacctggtgtccaggcttagccccaactttaactctaggaattattctgcaactggttcttacctcaatggcggaatgcactcgcctgggttggctgttgtgtcacctgtatctccagttactgtgcatgctccagcagagaaaggagtgagtggatttctagtggat

SEQ ID NO: 12582 - DNA, 97 bp, Glycine max
  Clone ID: 701065949H1
tcgcgaggcagtgagggactagcacagaaagatattgtctggtgtacggtggtgagtgtcgacgctgctactctcgactgtctctgagatcagacat

SEQ ID NO: 12583 - DNA, 198 bp, Glycine max
  Clone ID: 701065950H1
tccattctctgtctgtctctctctctctcgatcaatcatggctttgcccaatcagcaaaccgtcgattagcctagtatcaaactcgtcatcgtctgtgacatgtgtacagtaaaaacaacgttcgtgaaaaggatcttaccgtagtattttagaatgtatacgaaccgaccattggagtggaggttcacccattggat

SEQ ID NO: 12584 - DNA, 148 bp, Glycine max
  Clone ID: 701065952H1
ctcgcaccccacttacatacacacgatcccactcctccgagccggccgagttgaatcggtgagtcagtcaccgagttgaaccatgtcggacgaagagcaccatttcgaatccaaggccgatgccggagcctccaagacctatcctcag

SEQ ID NO: 12585 - DNA, 236 bp, Glycine max
  unsure at all n locations
  Clone ID: 701065953H1
cgccatggctgctctgcaatacttggaatcgctgcgcaacgcgcatcctgagctctccgattggtccaattcgctggcggatctataccagaacaagctctggcaccagcttaccctcaagcttgagcagttcgtggctctcgccgtcttccaggccggtgatgcattaatacaattatatcacaatttcatcacagactttgaacccaaaatcgaccttccnaagttgcgcattt

SEQ ID NO: 12586 - DNA, 96 bp, Glycine max
  Clone ID: 701065954H1
gtttatgtaagtttcgttttcggttgttctacttcggagtctgtgaagcagccagcatttattgtgtcacgagcccaccatgcagatgcagatgaa

SEQ ID NO: 12587 - DNA, 161 bp, Glycine max
  Clone ID: 701065955H1
ctcttcttcgtctcaaacctcttcgttccttcgattcattccatctcttccaaaatggccaaagatcatgtcgcggctcgtcactggagcgcaggcaaattggatatgctcgtgcctatgatgcaggggatgatgctggctgacagccggacctcaatgct

SEQ ID NO: 12588 - DNA, 264 bp, Glycine max
  Clone ID: 701065956H1
caaaaatggcggtgcctcttctctcgaagaagatcgtgaagaagaggctcaagaagttcaagaggcctcaaagtgacaggaagatttctgtgaagacaaactggcgcagaccaaagggtatcgattcccgtgttaggagaaagttcaagggatgcactttgatgccgaacattggttatgcttcagacaagaagacccgccactatctcccgaatggtttcaagaaatttgttgtacacaatgtgaaggatttgaaactgctca

SEQ ID NO: 12589 - DNA, 163 bp, Glycine max
  Clone ID: 701065957H1
cgcaagatgtcgaagagaggacgcggtggttcggcggggaacaagttccggatgtcgctgggtctgccggtggcggcgacggtgaactgcgccgacaatacgggggcgaagaacctctacatcatatcggtgaaagggatcaaagggcgtttgaaccgtctcc

SEQ ID NO: 12590 - DNA, 247 bp, Glycine max
  Clone ID: 701065958H1
cgccaaaacctctgcactcatcgactgctgttcatgttgctaccgaagcgttggattcatcccctgatcccttggacccacctccagaaacccttgatgatgactctgacgccaccacctcagacgttggtgactccgggactcctagcacttcagcaattagcattggtggcgatgcagatacaatggcaccatagcagaagattagattcaacgctaggtcttactgggtgcccttgatagagga

SEQ ID NO: 12591 - DNA, 264 bp, Glycine max
  Clone ID: 701065962H1
aagaggcagtgcagtggttctactactttgcttcttgctgcttcactctcagatggctcgtgctgccacctacacagttggagattctgggggttggacctttaacactgttgcctggcccaaaggaaagctctttcgggctggtgacacacttgctttcaattatagccctgggactcacaatgtggtggccgtgaacaaggctggatatgatagctgcaagactccaagaggagccaaagtgtataagtcagggacggatca

SEQ ID NO: 12592 - DNA, 264 bp, Glycine max
  Clone ID: 701065963H1
tcgcaataattctgagtcagggcttcaagcaccgtgtggcttcgtcttcccggcatcgcggtgttcttcgcagtgctgtcaaatcgcgtttttcacaatgttgtagctccaatcgtgtttaccacacttcgcaattgcaggttgttaattacagaagataggaattgtgcattcttttttgctgaattttgggccaaggttgctagtcttagcaggactatctaaagcttaagcttttgaccaaagccttttcctggttaactg

SEQ ID NO: 12593 - DNA, 93 bp, Glycine max
  Clone ID: 701065964H1
cgagataactagaaacagtgtgatgaaaatgaaggtccttgttttcttcgttgctacaattttcgtagcatggcaatgccatgcgtacgatat

SEQ ID NO: 12594 - DNA, 98 bp, Glycine max
  Clone ID: 701065965H1
gtcatagagagttcgacgcggcggtttcagaagtagattgcaagatgaagttcaacatcgcgagtcccaccactggatgccagaagaacgtcgagatc

SEQ ID NO: 12595 - DNA, 97 bp, Glycine max
  Clone ID: 701065966H1
cctttgtgctgctgctgctgcaaaacctagggttgagccttttgctcaggttttcagcgcttctttcttacaatggttctacagaacgatattgatt

SEQ ID NO: 12596 - DNA, 93 bp, Glycine max
  Clone ID: 701065967H1
gcgacaatgtaacaaataatttgtactttcatcaaaacaaaatcccgttgtatttttctcagatggctcgaacgaagcaaacggcccgcaagt

SEQ ID NO: 12597 - DNA, 265 bp, Glycine max
  unsure at all n locations
  Clone ID: 701065969H1
ctcgtaactcgtaacggcttcataccggacctttccttttctgtctctctctcaacttcaatgttagaatcttttgttcactcactgagccatggatggcgccgagttcgacgccgcgtttgggttcccatctgagtttccctacgagtttgactcggtcgggactgaaccggttgattccggttcgaccgggactgagagtagcgacgatgagggcgngtgcgcgggcttgactcgccggctgattcacacctcgtccaatgaa

SEQ ID NO: 12598 - DNA, 243 bp, Glycine max
  Clone ID: 701065970H1
agaatttccattgcatgcaaagcaaatacgcattatattactagtgttaatttgttttgtcgtttgcttctttctttgattaatgatgactagctttaaggttgcatgtgtgggtgcgatgatgtgcatggttgtcgccatgagtgttacactcatggcacagtgcggaatcacgtgcgggcaagtcgccggcgacgtgtctccgtggcttagtttatttttcgagcggcggaaaaccgtcgg

SEQ ID NO: 12599 - DNA, 166 bp, Glycine max
  Clone ID: 701065972H1
cagagaattacagagcattttccaacacgattacacgctcggatcaaacccctctttgtctccgaagctgcttttaatatcgtactggccttcgattgttctcgtctttaatacatactgttgtctcttcgatttgagggaacagtagaagagtctgagcatcggt

SEQ ID NO: 12600 - DNA, 278 bp, Glycine max
  Clone ID: 701065973H1
cggcaatcggctcgagcgcgttctatatgttattgaattgacaatgaggcctgctcttggtttgcttcctcttctatttgccttcttgttagctgccactacagaatcaagaaaagatacaggggaatattggaaaatgatcatgaaagatcaggaaatgccagaaggacttcaaggtcttgtttcatttcaatctgaagataaccctaagactcaagagcagcttggtaaaggttccaaaaaccattgtgaagagtctctagttacaaatacacaag

SEQ ID NO: 12601 - DNA, 108 bp, Glycine max
  Clone ID: 701065974H1
cgacaaccctagcccaaccggatcttcacgactaggagatggcaaagtcgaagaaccacatcgctcacaaccagtcgtacaaggcccataagaatggcatcaaaaagt

SEQ ID NO: 12602 - DNA, 264 bp, Glycine max
  Clone ID: 701065976H1
ctcgaagtccatcccaaggacacatttgtgttcagtatagatggcaccgtactctctaatattccatactacaaaaaacatggatatggggtggagaaatttaactcgaccttgtatgatgaatgggttaacaagggcaatgcaccggcactgcccgagactcttaagaattacaacaagctggtgtctcttggctcaaggattatattcttgtcaggaagaacactggacaaacaggccgtaacagaagcaaacttaaagaag

SEQ ID NO: 12603 - DNA, 242 bp, Glycine max
  Clone ID: 701065977H1
cttaggcactttcttgttttctctctcaccctcatatccatcatctcccacacccatggagcgacctctgagcaatcaataatcaagttacccacagaccaaccaagggtagagaaactgacccacttgcattttttctaccacgacatcttagagggcaagaacatcacggtggtgaaaatcatcgagccatcagcgagcgaggttcgtgaagcaactgggtttggaaccacttgcatgat

SEQ ID NO: 12604 - DNA, 258 bp, Glycine max
  Clone ID: 701065979H1
ctcttctttcattcaagctttgtgagtgattcttagaaatcgatctctagctacaatgaacgattgggctcctcctctcatagctgcggctttgttttggctcttgagcccgggaatgatctttcagttgccggggaagaatgcaccctttcagtttatgaacatgaagaccactgttgcatccatgtttgtgcacactgttatttatggtctgtttctgatgttgttcttcgttgttcttagtatccatctttatat

SEQ ID NO: 12605 - DNA, 262 bp, Glycine max
  Clone ID: 701065980H1
accagtttcactgcataaatttgagagacaactctgcaaacatgttggtttatcaggacctccttacaggtgatgagcttctctcggactccttccgttacaatgaaattgagaatggaatgctgtgggaagttgaggggaagtgggttgttaagggagcagttgatgttgacattggtgcaaacccttctgctgagggtggagaagatgagggagtcgatgacgcagctgttaaggttgttgacattgttgatacattcag

SEQ ID NO: 12606 - DNA, 99 bp, Glycine max
  Clone ID: 701065982H1
ctagctgatgctcccccagcccctgcagcagatgactatgaagccatatagacacttgtaagtttgtatcatatttttattttatggaataatctcatg

SEQ ID NO: 12607 - DNA, 90 bp, Glycine max
  Clone ID: 701065984H1
ctcattaattgcaagaatggcacttcgttgcttggagatgtccctttctgttctcttcactcttggtcttgcgagacaaagccatgccag

SEQ ID NO: 12608 - DNA, 271 bp, Glycine max
  Clone ID: 701065985H1
cttgggaggaggcactgtggcagaagtcctaggagtgtaaaacagacacgcaaaatgaagacgatcttgtcgtctgagaccatgaatattcccgacggcgtgagcatcaaggttcacgctaagggtatcgaggttgaggggcctcgtggaaaactcgtgcgagacttccaccatctgaaacttggacttccaacttattaccgacgatggcggtaaaaggaagctcaagattgattcttggtttggttctcgtaaaacctccgccgccatc

SEQ ID NO: 12609 - DNA, 190 bp, Glycine max
  Clone ID: 701065987H1
catcgagatatgcaactgtgatagcctccctgtgattcccttagttggtgaggtggcaagatcatgttcccttgtgaatcttgagaagatgcagaatcagcagcagatacagaaaatgctccagcaactttgctgagccttttctgttatgttatgtgatcagagcatcctcacggatcacgagcacttg

SEQ ID NO: 12610 - DNA, 199 bp, Glycine max
  Clone ID: 701065988H1
cctcgagccgaatcggctcgaggcggttccgcacgaagttcagccatcgcgcagaaggagaagataccacaagttcgcggagaaagcacggtgcaagattcagaagcgcgacgaggatttgattcacgaaatttgcaacgaagttggcgttgatagaaggttctcaaggtttggatgcataacaacaaaaacacctttg

SEQ ID NO: 12611 - DNA, 211 bp, Glycine max
  Clone ID: 701065990H1
caagatatctgcacatgagaccacatgggggtccacactactggtaccaagtattgttgggcagaagagatgcaagaactgcaagcaaagctgctgcaaactccaatcttcctcctccaacattcagcttctcacagcttgtttccaacttgaaatctcacggcttaaacgtgaggcaccttgtggccctctctggaggccacaccatagg

SEQ ID NO: 12612 - DNA, 243 bp, Glycine max
  Clone ID: 701065991H1
ctcctcctttctccatttttcctctgcgcctttgcatttcagcagcacaccacaatggccaccaatgcattcactggcacatctctctccatgcgatctgtcattcctcaaacacaggcatttgcctcaatttctggcccgacatctgcttcaatttccagctttgggagaaagaatgtttcttttagcttgcagccacgcttgaatcgccttaaaatttcctgtgctgccgctaaaccagag

SEQ ID NO: 12613 - DNA, 153 bp, Glycine max
  Clone ID: 701065992H1
ctccattctctctgtgtatttccctacctctcccttcaagatgcagatcttcgtcaagaccctcaccggcaagaccatcacccttgaggtggaaagctctgacaccatcgacaacgtcaaggccaagatccaggacaaggaatgaatcccccc

SEQ ID NO: 12614 - DNA, 260 bp, Glycine max
  Clone ID: 701065994H1
atgaaagccgtaagtccctccttcctctgcttataattcctgtgaaccttttacgtgctagcattgaaagtgcatcagcaaacgtgaagccaagccattatgctgcagccttcaataggagtgtttttccttctggttttctatttggaataggctctgcagcttaccagatataaggagcagcagctatagatcgcacatgacctagtatatgggacacctatactagacagcaaccagggtagatttgggatcatagt

SEQ ID NO: 12615 - DNA, 107 bp, Glycine max
  Clone ID: 701065996H1
cctttggccatttctttagtaacattaagataatgtattctgtggaaatggcaccttatggtagattcattgctaacattttgatagctgtgatgtctgtctgcttg

SEQ ID NO: 12616 - DNA, 266 bp, Glycine max
  Clone ID: 701066001H1
ctcgagccgctcgagccgcgccgactcggttgctatcagcgagtgcgagtgagtgagtggttctcttgcagcaacaaggtttagtgacaccaaacagacgggaaatgggtcgtggggtcagtgctggtggtggacagagttccttggattatctctttggcagtggggtacctgccagcagtgcaaatggtgctcgcactcaaaatgcaagtgctccttcacaaccggttgataagcaaagtccagcaccagcaccagcaccagca

SEQ ID NO: 12617 - DNA, 242 bp, Glycine max
  Clone ID: 701066002H1
ctctcttgtgctggtgaaaatcatgtacatacatttcaggactatttagtaatagatgatggatttttgctctggtatgttgttttccttcctgtaccatctatttccatttacaatggtttgttcctatccttttagctgccccattaaattgggggctatcaagacttgttctttttactcctacatttaatctttacaagaggaaatcctcctgaaaattttggcttcattgatgcaca

SEQ ID NO: 12618 - DNA, 276 bp, Glycine max
  Clone ID: 701066003H1
cgaaataacaggaagactaaaagagttctagacttctgtttagtggaagtcatctagctcatgaatgccaaggtgaaaaaagagaagattagggtactcattctctattctctaatttgaacttgccatgaagggtattgctctctgtctttaggaattctttagatgcaagacagatattcaaggtggaaggtcacatttcttcaagcatctatggaattctttattcctcttccttcttaatccttgtctttagtttttctatctctagctaaa

SEQ ID NO: 12619 - DNA, 271 bp, Glycine max
  Clone ID: 701066004H1
cctggatggggcaagcatagcaaagtagtcggcaatggcactttaagaaaggctgtcgaggcactcctaaatggcattggtgcaccctttcagatttctgagtgtaatttggggaggcttatatcagaaggacctgaagtagctgcttggttgagacaacctagcacattgaatgtgctgcttctccatgattgcattgtttattctcaaccagttgagagacaccaaacattcaatataccatctcttggtgcattgtagagaaattgag

SEQ ID NO: 12620 - DNA, 266 bp, Glycine max
  Clone ID: 701066005H1
cgacatccgaatgacacatgggaggtgactttgccggcagaggaagttcctccggagcttccggagcctgcactcggaatcaattttgctagggatggcatgaatccgcaggactggctttctctggttgctgtgcacagtgattcgtggttgctctcagtggacttctatcttggagctcgtcttaaccgcaacgaaaggaaacgtttatttagcttgatcaatgatctttctactgtctctgaagttgtgactgacaggaagcc

SEQ ID NO: 12621 - DNA, 226 bp, Glycine max
  Clone ID: 701066006H1
caacacaacaaaaaaagacaacacagagagaagcgtcttaataaacgctcttctctgaaaaacctgatttcttctcttcttctcttctctttcgtttcgatcttcgatctctgaaaatgagagagtgcatttcaatccacatcggtcaggccggtattcaggtcggaaacgcctgctgggagctctactgcctcgaacacggcattcagcctgatgggcagatgcc

SEQ ID NO: 12622 - DNA, 280 bp, Glycine max
  Clone ID: 701066008H1
cctcgagccgaatcggctcgagaattgccttaaggaacgttcgagaccacagaggtttctctagtcttcttctgtggagagattgttttctcttgttcattcatctcacttccaattaaggaacaagctttccaccaatttgaatcaccaatggctcgctctttctccaacctcaaggatctctctgctcttgtcgccgacggattctccaacactctcaccaggcgtgggtacgcagtagcgacacaaagcgcaacaagaggaggagcagcctccatca

SEQ ID NO: 12623 - DNA, 237 bp, Glycine max
  Clone ID: 701066009H1
aacctcaggaggagaatgttcctctgaatccgaagcccgtgctctacccagcgactttgccagaaggggatatctggtgtaactgaaggtgtcccaatctcattttggagaacagtactatttgtgtgccactttctggattgattaaccatcttaggtagcagaggtcctgtaatttacttctttcatgtctctggaataacttcttttattggttttccatttttcctttaaaat

SEQ ID NO: 12624 - DNA, 276 bp, Glycine max
  Clone ID: 701066010H1
gagcggaaatcgttcctatcatcacttctcaaatctcgaaccctctcgttcgtgccgatcactaggtcacacttcatcaatggcgggtagaggcaaaaccctaggatccagcgccgctaagaaggccacctcaaggagcagcaaagccggcctccaattccccgtcggtcgtatcgccaggttcctcaaggccggaaagtacgccgagcgcgtcggcgccggagcccccgtctacctcgccgccgttctcgaatatctcgctgctgaggttttgga

SEQ ID NO: 12625 - DNA, 176 bp, Glycine max
  Clone ID: 701066011H1
agaatggctcccaagggtttaacctttctggctgtgttaatatgcgtttcagcactgtcactgagtccttctgttgccggggaagggcaaaataatggccttgttatgaacttctacaaggaatcatgccctcaggctgaagacatcatcacagaacaagtcaagcttctctacaa

SEQ ID NO: 12626 - DNA, 274 bp, Glycine max
  Clone ID: 701066012H1
caaagatgaaccagaacccgcaatcaagtgatggaaggaacgatgacgattctgctatatctgatttcctcgcttccttaatggattatactcccactatacccgatgaattggtggagcattacttggccaagagcggttttcaatgtcccgatgttcgattgactaggttggtagctgttgccactcagaagtttgtcgctgaagttgcaggagatgcacttcagcactgcaaagcaagacaagcaacaattccaaaagacaaaagagacaa

SEQ ID NO: 12627 - DNA, 272 bp, Glycine max
  Clone ID: 701066013H1
ctcgttcttcttcttttgttgttctgtgtttgtgtttgttttttctctcacctgaaaatgtcttgctgcggtggtaactgtggttgcggaagctcctgcaagtgcggcaacggctgcggaggctgcaagatgtacccagacttgagctacactgagtcaaccaccaccgagaccttggtcatgggagtggcacctgttaaggctcaatttgagggtgctgaaatgggtgtgcccgctgagaacgatggctgcaaatgtggaccaactgctcc

SEQ ID NO: 12628 - DNA, 245 bp, Glycine max
  Clone ID: 701066014H1
cttcacagaagcgtaaaaacaaaaggcttgactagagaaagagagagagagagcttcgaatcgaaactcagaagtagaaagaaacacaaatcacaatcgctatggctaggtacgaccgagcaatcaccgtgttctcccctgacggccatctcttccaggtcgagtacgccctcgaagccgtccgcaagggcaacgccgccgtcggcgtccgcggcaccgacaatgttgtcctcggcgtcgagaag

SEQ ID NO: 12629 - DNA, 138 bp, Glycine max
  Clone ID: 701066015H1
cgctgtggttatcatcttctccttcctctttcttagatcccttctttctctacgccgcacgccgaaaccatggtcggaaaaggagagggtcctgctatcgggatcgatctcggaaccactcagtcttggtacggtgtg

SEQ ID NO: 12630 - DNA, 221 bp, Glycine max
  Clone ID: 701066017H1
gtctagcggttcgatgatttgtatcgtaagtctgtggcatttgagaagcagtatggggacagggaagggattgaggatgctattgttgggaagagaaggtttcagtatgaggatgaagtgaagaagaatccgttgaattatgattcctggttcgattacataaggttggaagaaagtgtgggggataaggagagattcagggaggttatgagagggaatag

SEQ ID NO: 12631 - DNA, 255 bp, Glycine max
  Clone ID: 701066018H1
cgacaagcctctaaggcttccattgcaggatgtctacaagatttatggtattggtactgtgccagtgggacgtgtagagactggggttgtgaagcctggtatggtggtgacttttggtcccactgggctgacaactgaggttaagtctgttgagatgcaccatgaggctctcacagaggctcttccaggtgacaatgttggatttaatgtgaagaatgttgcagtcaaggatctcaaacgtggttttgttgcatc

SEQ ID NO: 12632 - DNA, 265 bp, Glycine max
  Clone ID: 701066019H1
cgagcagccacacctcccgcagcagccatggttctcaaaactgaactatgccgattcagtggtgccaagatctacccaggaaagggcatcagatttgtccgtcgtgattctcaggttttcctgtttgcaaactcaaaatgtaagaggtatttccacaatcgcctgaagccttcaaagctcacctggactgcaatgtacagaaagcaacacaaaaaggacattgctcaagaagctgtgaggaagaggagacgtgctgccaaaaagc

SEQ ID NO: 12633 - DNA, 273 bp, Glycine max
  Clone ID: 701066020H1
ctattttctcctttcctttcacattatcccttcccttttttaaataagccatcttgcttttgtttcttctcttctcatcaccaacacggtgtgtgtccttcatcctggattagagccacaataataacacattccgctttgactttggaggctaagggcctaaggcaggtttttttgctttgtcaggttcccaatcactgtgatatcatggaatccccacaatccgttgtgtcaccattcaagagctctgtcttgggtgaagctgagaagtat

SEQ ID NO: 12634 - DNA, 274 bp, Glycine max
  Clone ID: 701066021H1
agactaaccaaaaggagagtgcaataactcgttgtacattcctagtgtgtgggagacacatggctaacatgtgtgtcttggtgttggttcttgctctggctgtggccacaagtgccagaaacgttcccaaccccaaggatgctggtcttaaggaccagaagaacttcatcagctatggtggagttggtggttattccgggattgggaacaatggactgccttttggaggagctggtgccggaataggtggtggttttggcggacctggtggact

SEQ ID NO: 12635 - DNA, 275 bp, Glycine max
  Clone ID: 701066022H1
ctgcgactaagagttgctgcttcttccgccactcagcacttcgctccctctgtgcttcaccaaccatggccgaaatcgaagctaccgttccagatccctctcaaatcgacgtcaaacttttcaaccgctggagcttcgacgacgttgaggttactgatatgtctctggctgattacattggagtgtccccgtcaaagcatgctacatatgttcctcacactgctggtaggtactcagtgaagaggttcaggaaggcgcagtgccccattgttgag

SEQ ID NO: 12636 - DNA, 273 bp, Glycine max
  Clone ID: 701066023H1
gtcgaagcgaggtcgcggaggatcggcagggaacaagttccgcatgtcactgggtctcccggtggcggcgacggtgaactgcgccgacaacaccggcgcgaagaatctctacatcatatcagtgaaggggatcaagggaaggctgaaccggttgccgtcagcttgcgtgggtgacattgtcatggccaccgtcaagaagggacatcctagtcctcggaaaaagggtgctccccgccgtcatcgtccgtcagggcaaccgtggcgccgaaagga

SEQ ID NO: 12637 - DNA, 280 bp, Glycine max
  Clone ID: 701066024H1
gagctataagctagtttatcgtgaggagaatatgaagttgtttgtcttctttgttgctgcagtagttttggtagcatggccatgccatggcgcaggctaccaaaggttccctctccgaatgaaaactggctatggtgagcgttcttcggaggtaaaatgcgcaagttttaggcttgctgtggaagcacactccatccgagacattaaaaccattcctgaagagtgcgttgaaccaacaagggactacattaatggcgaacaatttagatcagactctaaa

SEQ ID NO: 12638 - DNA, 226 bp, Glycine max
  Clone ID: 701066025H1
tgaagatgtttccgctgctctgcgttctgtctctttgctacctcgtctattatcaccatcactcattccaagactgttccacccattcttgacgatactaatttcaaccgaaccagtttcccgcaaggctttgttttcgggacagcgtcagtgcataccagtatgaaggtgctgcaagggaaggtggaaaatgaccgagtatatgggatactttcactcataatta

SEQ ID NO: 12639 - DNA, 228 bp, Glycine max
  Clone ID: 701066026H1
tcgagcgtaaacaaacagcacattcaagaagaaggctcctaaagcaattaaggagataaggaagtttgctcagaaagcgatggggacgaatgatgtgagagtggatgtgaagctgaacaaggctgtgtggagccaggggattcggagcgtcccgaggaggattagggttcgcattgcccgaaagaggaacgacgatgaggatgcaaaggaagagctatattcccttgt

SEQ ID NO: 12640 - DNA, 247 bp, Glycine max
  Clone ID: 701066027H1
ctccaatttttattatctttgctggcgccttaagataagttaaccctttgaagatgtttcgttgtttacttggttggcaaagttcagaattgtacatttgtagggctggatgtggaggggactccttactttttgttttattattaccctgtaatttatttttaagctttgttctaatatgtttggatgttaagatattttgctagctagtataaatgaatggcaggaccgatactttatgcgataa

SEQ ID NO: 12641 - DNA, 275 bp, Glycine max
  Clone ID: 701066028H1
caaattagttcattctctttgcgcagttccctacctctcctttcaagatgcagatcttcgtcaagaccctcaccggaaagaccatcacccttgaggtggaaagctctgacaccatcgacaacgtcaaggccaagatccaggacaaggaaggaattcccccggatcagcaacacccaatcttcgccggaaagcagctcgaggacggccgtaccctcgccgactacaacatccagaaggagtcaacccttcaccttgtccttcgtctcgtggtggca

SEQ ID NO: 12642 - DNA, 234 bp, Glycine max
  Clone ID: 701066030H1
caaatccagaaaaagagagaagaggaaagacaagagagtaagcattgaaatttccaaattctcaattgtttcttccattcttgttgttgttgttcttcgcgataactccctttcgcggttcagggcagcaaacggattggaacatcgaagagactcaacatggaaatggggtttgccgcagagttcttctgagtctcaaagagaagccctcaggaagtaacgttactttgaatg

SEQ ID NO: 12643 - DNA, 277 bp, Glycine max
  Clone ID: 701066031H1
ctaatctccatctaatagtgttaatttgtctttctctatctctatcggtcatgggtgcttttgcttttgatgaggaaaactcctccaccgtggctccggcaacactctacaaagctctgacaaaagatgctgacactatcatcccaaagattattggggccatccaaactattgaaatcgttgaaggaaatggaggacccggaaccgtcaagaagataacagctagtgaaggtgaccaaaccagtttcgtgctgcaaaaagtggatgcaattgacga

SEQ ID NO: 12644 - DNA, 281 bp, Glycine max
  Clone ID: 701066032H1
atcaaatcggagtggtggaggaatggtatcagtgactactcggccttccccaaacgtagttggagtcgcaaattccaaacatggcgtggagtggtgtgggcactttcagatgccactgcactatccaaggtacacccaagctgactatgaggcaatgccagagtggaggcttgactgcttgctcaaagagtatggtttaccaatctttggggatgttgagagcaagagaaagtttgccatgggtgccttcctatggatcaagtgggcttccaatgtcttag

SEQ ID NO: 12645 - DNA, 261 bp, Glycine max
  Clone ID: 701066033H1
ctttgacaatgagacatcagtgcctccttctggtctccctggtgttggtctcctacgctgcccggtcggaatcagcgctgggcggctggagccccatcaaggacgtaaacgacagccacgtggcggagatcgccaactacgcgctgagcgagtacgacaagcgttctggggccaagctcacccttgtcaaggtcgtcaagggcgagactcaggtcgtttccggcaccaactaccgtctcgtcctcaaagccaaggatggat

SEQ ID NO: 12646 - DNA, 222 bp, Glycine max
  Clone ID: 701066034H1
aagagagaaaaaccatggcaataacactcaacaatggcttcaagatgcctatcattggattgggcgtgtggcgcatggaaggaaacgaaatcagggacctaattctcaattccatcaaaattggttatcgccattttgattgtgctgctgactacaaaaacgaagcagaagttggagatgcgcttaaggaggcttttaatagtggccttgtgaaaagagagg

SEQ ID NO: 12647 - DNA, 270 bp, Glycine max
  Clone ID: 701066035H1
gtcgagctgagaataccagttgctccagtagccggcactaaacaacatggcggacaaggcagtctgcatccgaaccaggaagtttatgacaaacaggcttctctccagaaagcagttcgtcgttgatgtccttcatccagggagggctaatgtttccaaggctgaactgaaggagaagctgggaagaatgtatgacgtgaaagacaccaacactgtatttgtcttcaagttccgaactcattttggtggtggcaagtccactgggtttgg

SEQ ID NO: 12648 - DNA, 271 bp, Glycine max
  Clone ID: 701066036H1
cctaattcacacccaaagagaaccaacaaaaaaaacaacagtggtacgtgatgccaccgaagttcgatccctcgcaggtggtggacgtgttcgtccgagtcaccggcggcgaagtagatccggagagttctctcgccccgaagatcggtcccttgggactctccccaaagaagatcggagaggatattgcgaaggaaaccgcgaaggactggaagggcctccgcgtgacggtgaagctaaccgtgcagaaccggcaggcgaaagtaacggt

SEQ ID NO: 12649 - DNA, 194 bp, Glycine max
  Clone ID: 701066037H1
gccaaaggaggtcgaacaattggcaaggaagttcctttataacccatacaaagtaattataggctcttctgatttaaaagctaaccatgcaatacggcaatctgttgacattgtctcggaaaagcagaaatatgataaattggtaaagtggctagaggagatcatggatggcagccgaatactgatatttatgg

SEQ ID NO: 12650 - DNA, 235 bp, Glycine max
  Clone ID: 701066039H1
aaaccttctgaggttaaagcaaaaaacaaagagagagagagagagaaaatgatgaagccatcgatgctcagatctctccactccgccgccacccgcggcgcctctcatctcttccgccgtgggtacgcctccgagccggtgccggagcgcaaggtagccgttctcggcgccgccggcgggtatcgggcagcctctctcccttctcatgaagctaaatcccttcgtttcgagcctc

SEQ ID NO: 12651 - DNA, 266 bp, Glycine max
  Clone ID: 701066040H1
gctagaagcaataagatgaaaatgaaagtgcttgttttgtttgttgctacagttttggtagcatatgaatgccatggctcagactaccagaagttccctctccaaatgaaaactgggtttggtgggcaatacagcaatgaggtggcatgtgccagttggaggcttggcgtggaagcaaacaacgtagtcaagtggcaaactgttcctgcagcttgcggagagtacatagctgactacgttctaggagaccaatatagatcagattc

SEQ ID NO: 12652 - DNA, 245 bp, Glycine max
  Clone ID: 701066041H1
gcgccatcaaaaatacccgatagtgcagaaaatcttggggaagtacttcgtggtgaccgcattgagaattctctctatgtgtataaaatgcgcgaccacaaatgtgcaatattctgtgtaatcttaaacttgatgctaaaactgctaaggagttcaaagagaagatcagtgatgagtatcgggtgaacatgatcctagataaccttcctctagtctgtcccttgaaacgggattgatcaggtttc

SEQ ID NO: 12653 - DNA, 197 bp, Glycine max
  Clone ID: 701066045H1
gagctataagctagtttatcgtgaggagaatatgaagttgtttgttttctttgttgctgcagtagttttggtaccatggccatgccatggcgcaggctaccaaaggttccctctccgaatgaaaactggctatggtgagcgttcttcggaggtaaaatgcgcaagacttaggcttgctgtggaagcacacaacataa

SEQ ID NO: 12654 - DNA, 263 bp, Glycine max
  Clone ID: 701066046H1
tctagatgagtgtctctctatgtctgcaatctccctcacatacattttgttttatagctcatacttcagataagtgtgcgtgtgtgtttattatctgtttcttgaaattacgttgcataattgtttgcacatgcttgttcagacacccccacattttttttcaatatcttatatttatacagttttaaaagcagtgttatcattgatggatggtgacgtatggcagaggataacatttgggcacataaacacaccattggggc

SEQ ID NO: 12655 - DNA, 201 bp, Glycine max
  Clone ID: 701066047H1
agaagggtaaggtaaccctagagtggtgaatcgaatctgcaaagatggaagctgtttctcgaagacgaggtggaggcattttcgaaagcctctacaaggtcgttatgcgtcgcaattctgtctacgttaccttcgtcatcgctggcgccttcctcggagaacgggctgtagattatggagtccacaagctctgggaggcta

SEQ ID NO: 12656 - DNA, 206 bp, Glycine max
  Clone ID: 701066049H1
ccagggtgttattggtgggtgtagaaagtagcagaaaatggctgtgatcccgtgtcactgttaccgtaccgtcggatcagacaaaccctacctctccggtcagagtctccgccgtcgcgctcctttccccgccgtctctgtttcatttcgacgccgaatatcatgcgtcgcctcttctgccatcgctcaaaaagtggggctgaaag

SEQ ID NO: 12657 - DNA, 272 bp, Glycine max
  Clone ID: 701066051H1
gttcagtgttgggatcattcgggtttttgttactcggttcattcgaatggcgacatccttgtcacacgtgtttttgaagggaatcgcagctcgttctctcagcagacccttaaatgggttgttttattgcacaagatactcgaatactgtgtcaaatgattctgacacgcatgatgacttcaagccaggtaataagcttgagggttctggcatttgtttgtctaatgttattgagcaggatgtcaaggataatcctgttatggtttacatga

SEQ ID NO: 12658 - DNA, 253 bp, Glycine max
  Clone ID: 701066052H1
tcaaaatcagacacctgactaacactgcatgtagcatactcaaagtccttcccgcttccaattttccttgaagatcattctttatgattgcttctatccatgttcatataggtcagataaaccaatcttagggaatggggttgtagagctaacgtcctagagttcggtatattacccactagggttagagaggaagacttcattatgatgatagttgaattcagtgtagtctaatacagatctgaatctatca

SEQ ID NO: 12659 - DNA, 159 bp, Glycine max
  unsure at all n locations
  Clone ID: 701066053H1
tcgagaagccaggagagaanatagaaagttttatggtataaatctatagaatacaatcaaaccaaattgaaagaagatcgatcgatcgatcgatggctcttgtcggagtttaagtgaagcatgcggcggatggcgcaccggagtagaattgctccgcca

SEQ ID NO: 12660 - DNA, 272 bp, Glycine max
  Clone ID: 701066054H1
caattttcaccaaaacctaatactcccacaccaatcttcgatcatggacgccgattcacaacctcaacaactcgaagagagaacagaggagcaagaactgaagtacctggaattcgtgcaattcgcgaccatacaggctctgatgcgctgcgccatcctctactcatacgccaaggagcgcgcgggtcctctgaagcccggtgtcgacaccgtggaggaggccgtgaagaccgtcgtggctccggtctacgataggttccaccttgtccccg

SEQ ID NO: 12661 - DNA, 274 bp, Glycine max
  Clone ID: 701066055H1
cggagctccatgcaggtctgagcgtcttgctaaatataaccagctcttgagaattgaggaggagcttggtgctgaagcagtgtacgccggagctaacttccgtacccccgttgaaccctactaaagttttcaagtggaaaaaacctggagatccacacgagtttgagcattgagatttgggtgcgcggtttttggtgtgatatataagttgatagttggcacattagtcttggtatgataaagaccttgccaataatttgagttctgattcaca

SEQ ID NO: 12662 - DNA, 278 bp, Glycine max
  Clone ID: 701066056H1
gctcgtgcctctagggttatcatatctccattaccatttcctctctctcactttccaagaatcttaagctataggaacagtcttatccaaccgtgagcgctgagtaccagaaggccgttgagaatgcgaagaagaagctcagaggcttcatcgctgagaagagatgcgctcctctaatgctccgtttggactggcagtctcctggaacttaggacgtgagctcgaagaccggtggtcccttcgacaccataaggcgaccctctgaactcgctcacggg

SEQ ID NO: 12663 - DNA, 208 bp, Glycine max
  Clone ID: 701066057H1
cggcaaaccatcgagaaaccaaaaaccaaaatcaatttagaggaaaaagttggaagaagcatggattctaggcggcgtggtaaaaacgcatctatgcaacgcaagtcgcaacaacttcgatcggttacaaattccagtgctgtgaacaaagcctcaattattgtggatgccaccagatacatagaggagctgaagcaaaaagtggatg

SEQ ID NO: 12664 - DNA, 262 bp, Glycine max
  Clone ID: 701066058H1
tcgagcttcagaaatttgccatcgttgagagaagcgtgagagccttagtcgttcaagatgacagctaagtggaagaagaagcgcatgaggaggttgaagaggaagcgccgaaagatgagacaaagatctaagtaggtgcttgagcaggagttgagatgagctttccatctgctaccagcctcatgacattttaggctgttatggctctaatgatcttgaggcctagtcgtaaggggagctccatcctggactaagttggctt

SEQ ID NO: 12665 - DNA, 268 bp, Glycine max
  Clone ID: 701066059H1
cttcagcagaaggaacatcccaaattcaaaagaaaggctgaagatctttttgtagagcacactttgtcccttaccgaggccttgtgtggcttccaatttgtgctgactcacttggatagccgtcagcttcttattaaatcaaatcccggggaagttgtgaagcctgattcatacaaggctataaatgatgagggaatgcccatgtatcagaggcaatcatgaaggggaaactttacattcacttcactgtggagtttccagattctct

SEQ ID NO: 12666 - DNA, 163 bp, Glycine max
  Clone ID: 701066060H1
cgccgtaaacagaagagagagagagagagagagagagtcctgaaacttgggtgcgattccttcactcacaacaacaacacatcactatggctcttctgagtcgagcctcttcacgcttccctcagctggtttcccctcaaagggtagtttcactccacacaac

SEQ ID NO: 12667 - DNA, 271 bp, Glycine max
  unsure at all n locations
  Clone ID: 701066061H1
gttcttgggttttcaactggcgtggccacaaatggagtgagcgatgagagacagacagattcaatngaagagtgttcagaatggttgaaagcacatggggccagcataattactgataacaacggagatatgctgctagatacaaaagtttcatcatctaatctgtttgtgccagagccagaggatgctgttgcccacggagatgccaatcttgctgttgatgactttttagcaagagcgcctttatagccaactttattgtttttgaagc

SEQ ID NO: 12668 - DNA, 253 bp, Glycine max
  Clone ID: 701066062H1
cctcgagccgaatcggctcgagtaatcccatccacaaaagcactgtacctgatgatgaagatgcacattgaatttgtggggggttcaggcacaaccaatccaaccacaaaaaaagatgctagcagctttcaaatctttgacatcatgggcattttgctcaacccaatccccacacagttttccaaagacaccaattatttgccaaccatcagaaaatgccattgagttgggcctcaagatagccaacttaatc

SEQ ID NO: 12669 - DNA, 239 bp, Glycine max
  Clone ID: 701066063H1
agaaagtggtgaacttgctccaatgtttgttcctggaccctttgcaatagctcatcaccttatttcctcctgggcattcccagatcataatgtaaatggcagtgaatgtcattcaaaacaggctagtggttctatgtcaaatttgtaggagtgcaaattatttttttaaaggcacctttgattttacattgttttccatactaaactgatgtgagatataatcaatcaccataagactg

SEQ ID NO: 12670 - DNA, 275 bp, Glycine max
  Clone ID: 701066064H1
tttcagtgagtgatcggtgttcacttgatccttcataagtcgtcatcatcatcatcatcatcaccgttgattgaagaagatgccgatcagaaacatcgccatcggaaggcctgaagaggctactcaccccgacacgttgaaggcgcggttggctgagttcatctccaccttgatcttcgtgttcgccggttcaagttccggcatcgcctacaacaagctcaccgacaacggcgccgcgactcccgccggcctcatctccgcttccatcgcccatg

SEQ ID NO: 12671 - DNA, 287 bp, Glycine max
  Clone ID: 701066065H1
cggacgtccggtccaatacgcttctcttctctgcagcaactatgcctaaccctaaggtcttcttcgacatgaccatcggcggtcaatctgctggccgcatcgtgatggagctctacgccgacgtcactccccgcaccgccgagaacttccgcgcgctttgcaccggcgagaagggcgtagggcggagcggcaagcccctccactacaagggctcgtccttccaccgcgtgatcccgagtttcatgtgtcagggtggcgacttcaccgccggaaacggaaccggcggc

SEQ ID NO: 12672 - DNA, 187 bp, Glycine max
  Clone ID: 701066066H1
cctcgaaccgtatcggctcgagggtggagataacggcacctgcaattactgaggatctcgaaaactttatgccaaatcagactatttaggcagctgaaggggaagcagctaaatcacagtatcaacagggcccttctggccactgggtcgatgtgatatgaagctcaagcgccagtcatgcgaatat

SEQ ID NO: 12673 - DNA, 194 bp, Glycine max
  Clone ID: 701066070H1
ctattactgagtgcttacagttgctgcgtcgcaaggcaccggcggcgacggagaactatcttctcaattttcgatcactgcattggttctgttgacaagggttttgttcttcctgacttgcatacttgatggcttcaaagttgcagaagttgcaggccacagcatctcaagcgtctcaatttgtatccagtcgt

SEQ ID NO: 12674 - DNA, 195 bp, Glycine max
  Clone ID: 701066073H1
cagggctcgagtttggttgtaagctcttgtgatggtgaagacatacttgtatcatttggaggatacaatggacattagaataatgaggtctatgtccttagagcaagccacaaatcaaccttgcaatcaaaactaatagtgaaccccattccatacagtgtttctggtgcgcataatgccgcaaatgttacccga

SEQ ID NO: 12675 - DNA, 189 bp, Glycine max
  Clone ID: 701066074H1
caccactcttaatttctctctgccttgctcatttacacacctctccaacctttcactttcagctttatttgaatccctctctctcctttccaaatggccagcgttgaggttgcacatcaaacaccaacaacagttccagacaatgaaacacccgaggtaatcaagacccaggaaacaacccgggaacca

SEQ ID NO: 12676 - DNA, 269 bp, Glycine max
  Clone ID: 701066075H1
ctgaagaagtacccaaaaaaagtggttaaattagagccttagaaattaagtagacagtgtgattttgtttgcatagattgttttgtgagattttatagttatatatttcgtgagtccttttattttaggtttgcttagtctgagcccaataatgtggtggataaaaatgcgcttctaattcatgttatttgtcattttttcaccaagaaatgaattttatttaccatagatgcaataatttgctgctttctttgacatcttgtcggtgt

SEQ ID NO: 12677 - DNA, 269 bp, Glycine max
  Clone ID: 701066076H1
gacaaatctctctctaacaccttcaaatcttaaattattattcactttcctcctctctctctcagcatggcatctcaagcaatcaccttcaagtccttcgccaccgttatcatcgtggcgcttttcttcgccgccgccgccgcctccgctcaggatttgtctccggcgccggcaccgggacccgatgccggagcagccggatccgtttcgagctcggtggccgtgattggagcttcggttgtgctgtcaatgctcgccatcttcaagca

SEQ ID NO: 12678 - DNA, 250 bp, Glycine max
  Clone ID: 701066080H1
ctcattaattgcaagaatggcccttcgctgcttggtgatgtccctttctgttctcttacatcttggtcttgcgagagaaagccatgccagagacgaagatttttggcatgctgtttggccaaacactcccattccaagttcattgcgagatcttctaaagcctggccctgcaagtgttgaaatcgatgatcaccctatgcaaattgaagaaacacagtacccgaaaaccttcttctataaagaagacctt

SEQ ID NO: 12679 - DNA, 252 bp, Glycine max
  Clone ID: 701066081H1
tccagctacagcctacaacctacagatcaaggaaggaagatgttgggtgttataaggcacaagagtattcgtcccgccttctccgcaatcagacacttctcttctgcagctaaagagattactgtcagggatgctctcaactccgcactcgatgaagaaatgtcagctgatcctaaagtcttcttgatgggtgaagaggttggggactatcagggtgcatacaagatatccagggggctgctcgaaaatatg

SEQ ID NO: 12680 - DNA, 269 bp, Glycine max
  Clone ID: 701066082H1
catgattcgaagccttgctctgcacttggctgcacgcatccgacacaaccacaacctcgtgcgtctttcttcttcttcttctgccgcttctgcctccactcttcatcatgccactccctctccttcttcctctgagcccgttcacatcacccaaaactgcgttcgagtaacagagaatgaaggaactggaaggtagtgaatcatcaacagatggaaaaatgcttcgtttgagtgtggaaactggtggatgttctggattccagtatgtt

SEQ ID NO: 12681 - DNA, 236 bp, Glycine max
  Clone ID: 701066083H1
cgagtctgttgatcgagataactagaaacagtgtgatgaaaatgaaggtccttgttttcttcgttgctacaatttccgtagcatggcaatgccatgcgtacgatatgttccctctccgaatgaacactggctatggtgcccgtactccggaggtgaaatgcgcaagttggaggcttgctgtggaagcacacaacatctttggctttgacaccattcctgaagagtgcgttgaagca

SEQ ID NO: 12682 - DNA, 213 bp, Glycine max
  Clone ID: 701066084H1
cacacttctgataaggttaattttcagttttggttttttgggcggctccaatggcaacctctcaaatcactgcatcattgaggaacttgcctgcatttgaaaggtttcaaccttcagcgcttcgattttcttctgctgggcacgtcagaattggaacactcacgcaaccctcgtttccctctttcgttgtcaaagccgccactgttgttgccc

SEQ ID NO: 12683 - DNA, 171 bp, Glycine max
  Clone ID: 701066086H1
acaaggtgaaggtcctggaaacctggctgaggttgatgaatcaatggaagaagatgatgttggcaagaacaaggggaacagtgaagctggcatgcaaaatgaaaaattatatgctgcagatggtatgcttaatacaaaaatgaggcgagcaaaaaaaaaaaaaaagggggc

SEQ ID NO: 12684 - DNA, 268 bp, Glycine max
  Clone ID: 701066087H1
atcggccaaaacagcatcgtttcaccacttactacatcttgtctgcttctctgcttcatgcccccacaatcgtctcatcttgttgcttctgcatataagttgactaaaggttcgatgtcaacaagttggttgcatatgacctttttgcttactgttcaggaaagaatgcgacatatgcatcctacttatgatttggaggagtctaaaggtggatggctaaatgtagtcattggcttgctgcatctttgtgaaattaagttaaattggg

SEQ ID NO: 12685 - DNA, 275 bp, Glycine max
  Clone ID: 701066088H1
cctcgagccgaatcggctcgagattcttcatccatagacatggccaccgtcacttctgcagccgtctgctattccctcattcactggcctcaaggcaagcgcaggcaaagtgagtgccgcagttaaagtctcagctccccaagccacaaggttgggcatcaaggcttcgctgaaagactttggagcccctgttgtggccactgccgcgagtgcagtgctggctagcaacgccatggccattcaagtgttgctgggtggtgatgacgggtctctgg

SEQ ID NO: 12686 - DNA, 268 bp, Glycine max
  Clone ID: 701066089H1
cgaatatttcatttggtgggcttctgatgatgctgaagggagatacctctcattgcaacaagtctgagcttgatcagaggttgtatcttctgataaggaaagtctgaaaattgtatgtaaaaaaatatatgaggatatgaagccttgttgcagcaaaaagacaacatctatttctaacttcatgtttgagtattttagctgttgattatctcactaatgtgggtctgcagtaggacccgaagtttaagaaccaaatatttgtgatttg

SEQ ID NO: 12687 - DNA, 235 bp, Glycine max
  Clone ID: 701066090H1
ctgtcactgttagttatacactagttcatagcagatatgtcttcattcatgttatatcttctgtgattggtgtctagttattcaagttgtgtctgggatgaaaatggaacaatattattacttatagtagtaactataatgtgatgtattcctttgcagacaaattttcttctagttgcctataataatgcaacattctacccacaatagtgatggaccaacctggtggtgcatc

SEQ ID NO: 12688 - DNA, 267 bp, Glycine max
  Clone ID: 701066091H1
aattgtttgagtatgatgaagtacttaacagccaaagagatcgagtttatacagagagaagacgagcccttgaatctgacaatcttcagtcacttcttattgaatatgctgaattgacaatggatgacattttagaagcaaacattggttctgatgctccaaaagacagctgggatcttgaaaaactaactgcaaaaattcagcaatattgctacttgttgaatgatctatcccctgatttgctggggaacacatgttcagattacg

SEQ ID NO: 12689 - DNA, 270 bp, Glycine max
  Clone ID: 701066092H1
agcgcctcttgatagggtctcccattttcaattccttctcagtttccttttctctgaaaaaagatgttgagggttgcagctaggaggctctcttctctctcctcttcttctccgttgcggcccaatcacgccgcttccgcttttctctctcgaaacgacgtcgtctataatgaccacagatctgttccttcctcccatccccttcttcccttccgaggttttgctactgaatccctgatccacccaatagtaaacacccattattcccca

SEQ ID NO: 12690 - DNA, 269 bp, Glycine max
  Clone ID: 701066093H1
caccgcaggtttagagacaatttaacaattagggttgcttctcctttgccgacccacggctcccaaagctgatagttcaaagaaggctgatccaaaggcacaggccttgacaactgccaaggcagttaagtccggtgctaactttaagaagaagaccaagaagatccgaacatctgttaccttccatcgaccaaggactttgaaaaaggataggaaccccaaatatccacgcattagtgctccacccaggaacaagcttgatcactatc

SEQ ID NO: 12691 - DNA, 124 bp, Glycine max
  Clone ID: 701066095H1
ccagagcggcggagctaaagaagagagtgggcatagtagacgagaaaggagaagaagagaatcataagacagcaagacagacaatgggagtggagaagcagttgttgaggcctgacaggggtcc

SEQ ID NO: 12692 - DNA, 277 bp, Glycine max
  Clone ID: 701066096H1
cttctcctaagctctagcacttaactagcaatattaattagcatttgctagagagactaggagtataaacataccccagtttaagatggcttcaaaaacttgttcctcccttgcccttttcctcacactcaacctcattttcttctcacttgtttctgcatgcggttatacaccatgccctggtccaaacccaaagccaaggcccaaccccaaccctaaccctaaccctagcccaaagtggctcctgcccccgtgatgcactcaaactaggtgtatg

SEQ ID NO: 12693 - DNA, 124 bp, Glycine max
  Clone ID: 701066101H1
cggagagaggatgggtgcagaagcaaatggcggcgagaagcaattgaaatttctgatctacggtcgcagcggttggattggtggtctactgggtaagctctgcgaagagcgcgggatccaatat

SEQ ID NO: 12694 - DNA, 263 bp, Glycine max
  Clone ID: 701066103H1
gctggatccattcaagatgaaagaaaaaattaaaaagaaagaatcataacttttcttttgtctcgccctaggatgggaaaagatcatcaaacatttaaattgtggtcagttgtactctgattccctccaactgcagacttgtataattggatttcctcattgcctgaaaatagatgaccaacatgctcccaattgctctttctcaaaatcttcttgaatggattaacaataagatgtcagcttccttaaggatgttaaaatga

SEQ ID NO: 12695 - DNA, 107 bp, Glycine max
  Clone ID: 701066105H1
gtaacacgctatggcggcggaatcgggtggtacgccgacaaactttgatcttcccgaggaggtggtgcaagtgctaccgtccgatcccttccagcagctcgatgtgg

SEQ ID NO: 12696 - DNA, 123 bp, Glycine max
  unsure at all n locations
  Clone ID: 701066106H1
cgctcgagncgattcggctgagcaaaccctaactattctactatgcaagntaactattgcacctcagatctctcacttgaaccacagtggtgccttatcgctgtggttttcatcgtcttcctt

SEQ ID NO: 12697 - DNA, 69 bp, Glycine max
  Clone ID: 701066107H1
gtcaaacctgtgcaaacaggggaggggatgtaactttgttttcttgatagacaccaccaccttgctgtt

SEQ ID NO: 12698 - DNA, 185 bp, Glycine max
  Clone ID: 701066108H1
gtttcctatcattcctgcctgacgtctaattattgagtattatgcggaaactttttttggtgggtgatgtttacatgtgctacacttgtggccaagttgtacactgtacgagattctggtgtcatttgctgcattcggtctagttgaaattgagtactataagggtttcaatgtttttgggaaaa

SEQ ID NO: 12699 - DNA, 121 bp, Glycine max
  Clone ID: 701066109H1
ctgcttctgtgctcgcccttgtattccttcttgtcatactatttcaggacggattggtaacatgtatgaagaatgacgacggatcagaagaatggggatatgtgcaagttagaccaaaagc

SEQ ID NO: 12700 - DNA, 185 bp, Glycine max
  Clone ID: 701066111H1
cgcaacataaagaaagaatcccaggcgaggagaaagatggaggggaaggagcaggatgtgtcgttgggagcgaacaagttccccgagagacagccgattgggacggcggcgcagagccaagacgacggcaaggactaccaggagccggcgccggcgccgctggttgacccgacggagtttacgtc

SEQ ID NO: 12701 - DNA, 259 bp, Glycine max
  Clone ID: 701066112H1
ccaaaactatcagatttgaacattgactattgcaaggatatggtggaattacctactgggatctgtgatattaccccactaaagaagctcagtattactaattgccacaagcttagttctctgccccaaaacattggaaagttgttgaatttggaactcctgaacctaagttcctgcactgatttggaagagataccagattctattgtaaaactttctaagctaagacttcttgacctctcaaactgcataagccttt

SEQ ID NO: 12702 - DNA, 119 bp, Glycine max
  Clone ID: 701066113H1
tgctattggaggcaaaacgaaatgcaaaggaccaaatgtacatgaagatgacattaaatcagttactggttgagctagatggattcaagcaaaatgagggcataattgtgattggcgct

SEQ ID NO: 12703 - DNA, 190 bp, Glycine max
  Clone ID: 701066115H1
caccaacaggaactttaagttggcctctaggcttctgggattggattcaaagcttgagacaagtttactgattccattcagggaaatcaaggttgaatgtaccatacctaaagatgatggcaccttgcaatcttatgtagggttcagggttcaacatgatattgccaatggcccattaaaggggggctta

SEQ ID NO: 12704 - DNA, 261 bp, Glycine max
  Clone ID: 701066116H1
cggctcgagatcttggaaatcccggagaatctaccatgcttgaacttgccaaggtggttcaagcaacaatagaccctgatgctaggatagagcacaggcccaacacagaggatgacccgcacaagagaaagcttgatataagtagggctaaggatcaacttggctgggaacccaaggttgacctgcgcaagggcctccccctaatggtttctgacttccggcaacgcatttttggtgaccagaaggaaaaggcatccgtag

SEQ ID NO: 12705 - DNA, 109 bp, Glycine max
  Clone ID: 701066117H1
gttatcttgagaaacattattcccattgctatatattatggctagcatgaaggttacatgggtggttgtgatcatgtgcatggccgtggtgggtgcaccgatgatggcg

SEQ ID NO: 12706 - DNA, 122 bp, Glycine max
  Clone ID: 701066119H1
cgctctctctctcttagtcacagcacggtggggacgaccatggttagagacgatctatgcctcaccgttcccagcttcttccgctgccctatatccctcgacgtcatgaaatcccctgtgag

SEQ ID NO: 12707 - DNA, 153 bp, Glycine max
  Clone ID: 701066120H1
gcctcgccgactcggttgctatcagcgagtgagagtgagtgagtggttctcttgcagcaacaaggtttagtgacaccaaacagacgggaaatgggtcgtggggtcagtgctggtggtggacagagttccttggattatctctttggcagtggg

SEQ ID NO: 12708 - DNA, 203 bp, Glycine max
  Clone ID: 701066122H1
cactgagaggaagagggagtgagagagagtgttcttcacttgctaccttctcccagaaatggttacgttcaggtttcaccagtaccaggtggtcgggagggctctcccaacggaagcagatcagcatccgaagatctaccgaatgaagctctgggccaccaacgaggttcgcgccaagtctaagttctggtattttttgagga

SEQ ID NO: 12709 - DNA, 243 bp, Glycine max
  Clone ID: 701066123H1
gttggggtcaaaggcaccgcactgaagcgaatctggtaaagcagaaaagcgtagttggtgaaattcctgggatcccccactggacggagtttttgttgctttttctttcattcatctcttacactctacgactactcttccattcccaaacgaaactcagcgtttcttctgatcatggcaagcacgttgcggttatacttgacctgcattcggaacacgctcgaggccgcaatgtgcctccag

SEQ ID NO: 12710 - DNA, 257 bp, Glycine max
  Clone ID: 701066124H1
gctttggaaaaagttattgaatttttccagtccaagtacttcaagaaactttcagtgatcacataccatttcccagcaaattctgccactgctacagattgtggtatctttggaggggaaagaagactccaagtatgtgatagagaatgccaatgtggtagaggcattcaggaatggtaccttggtggcacaagtgggttcctcctacaacattcaatctcgggttagcactttctcgcaggagttgtccaagtgaa

SEQ ID NO: 12711 - DNA, 147 bp, Glycine max
  Clone ID: 701066125H1
tcaaaacactcataacacaaagcacaaagcaaagctcatccttgagttaaaaaatggcagcagcttcttccatggctctctcatccccatccttggctggcaaggccgtgaagctgggcccatcagccccagaagtgggaagggtga

SEQ ID NO: 12712 - DNA, 118 bp, Glycine max
  Clone ID: 701066126H1
ggcgaaacaggacctttaagcttcctaatcccatgtactacattgagtagtaccttcacctctctcaacaatctagctagagtttgctcctatctatatgtaataaggtatgctgata

SEQ ID NO: 12713 - DNA, 177 bp, Glycine max
  Clone ID: 701066127H1
ctacagtgctggttcgagtctgtttccgttgcaccgttgcaaaaccattcacctggtgaggcacgcgcaggggcttcacaatgtggagggtgacaaaaactacaaagcctacatgaaccccgattacttcgatgctcatctcactcccttgggatggcaacaggttgacaatttgcg

SEQ ID NO: 12714 - DNA, 184 bp, Glycine max
  Clone ID: 701066131H1
cattaaattaaaacaaaaaatgtgcgctgccatatccgaagtggaacaagaagagttgctcgaaaaattggaggtgttcaagatcaaaggcagggacaagcatggccgcaagatccttcgcattatcgccaaattcttcccagcacggttggtgagtgttgaggttctgaaaaactacctgggg

SEQ ID NO: 12715 - DNA, 262 bp, Glycine max
  Clone ID: 701066132H1
caagaatttggagctcaaaaacttccatcttctttacaagtcttatttgacactctcaagtttgaacacaaaaaacaatgggttttcgcttatctggaatcaggaagacatcattttctgcaaacaaatttgcatcttcaaaagtcatggatgtgccgaagggcaaccttgcagtctatgttggagacaaaatgaggcggtttgtgattccagtatcatacttgaaccaaccattattccaggacttgttaagccaagctga

SEQ ID NO: 12716 - DNA, 81 bp, Glycine max
  Clone ID: 701066133H1
gattctctgttctctgtcttgttctgtctcgcgtattgtcttcatacaggaacttgaacgatgaagaatgcaaatggcaag

SEQ ID NO: 12717 - DNA, 126 bp, Glycine max
  Clone ID: 701066134H1
caaactttcctgtagtgttggctccccagttttgttttggtaatccgtaattgttagtatgaattcgtagaaattctgttatatggttgatgatacattgttttatcgcatgaattattataatat

SEQ ID NO: 12718 - DNA, 235 bp, Glycine max
  Clone ID: 701066135H1
ggtaagccaatcaaattggacattaataaaggaatggagagggcagaacaaattggaggaggcaaagctgtggccacagtcctagccattggcacagcaaatccacccaatttcatccttcaggaggattatcctgacttctactttcgggtcaccaatagcgaccatttgcaccgcttgaagcaaaagttcaagcgcatttgcgagacttcaaagatagaaaacgacactagtc

SEQ ID NO: 12719 - DNA, 152 bp, Glycine max
  Clone ID: 701066137H1
ctaattcaacccttcttctatagttgtgtggcacagaggacggagccgaagaagccgttttcgcatgcctgcaactccacccagtaacaaaggcagaatctctaccctcttggcttatcatcttggccaagtttggtaagcaaccaaacaat

SEQ ID NO: 12720 - DNA, 120 bp, Glycine max
  Clone ID: 701066138H1
ggcaaaacaatgaaagtacaattcaccaagcgtccctatgcacaaccttatggtgtatatacatggttaacggatattaaagacacctctaaagaaggatatagttttgaagagatatgc

SEQ ID NO: 12721 - DNA, 166 bp, Glycine max
  Clone ID: 701066139H1
gctgttgttgctgctcatcctccgtaacctccgagctctgcaccgaagaacgaagccatggggaagacacatggaatgggatctgctcgcaagctcaagtcccaccgcaggaggcaaaggtgggctgacaagtcatacaagaactcacatcttgggaaatgaatgg

SEQ ID NO: 12722 - DNA, 220 bp, Glycine max
  Clone ID: 701066140H1
cttctctaccaccctctctatttctctttctctctcgatcttcgcttcccaatttctttgcttctcatatcatatttagccatatactagaaattaagctatccgattctgagggtttcgtttttcttttcctttcttacgtgctttgcagacagccaatcttgatcatgggtttcaattctgtctatagaagcttgcaggagatatttccgcggttgat

SEQ ID NO: 12723 - DNA, 199 bp, Glycine max
  Clone ID: 701066141H1
cttcagtctttcttggaactttgttactctcacacatgtctcgctccgtgcctttggtttcaaccatttttctcttgcttctgcttctggtggccactgagatgatggggccaacaatggtggcagaagcaagaacttgtgagtctcagagccaccgtttcaaggggccatgtttgagtgacaccaactgtggctctgt

SEQ ID NO: 12724 - DNA, 132 bp, Glycine max
  Clone ID: 701066142H1
gaaaaatttgagagacaaggaaaggcttaacaacgcacaaaatgtcctctaatccagtaatactgcagagtgagaacttgaccaagtatatactggagaccagcgtttacccacgagaagaagagtctctca

SEQ ID NO: 12725 - DNA, 141 bp, Glycine max
  Clone ID: 701066143H1
ggcagcgacacgtatcaacttcaataatcgcatcgcagaagcagtttccggtgcatctcatcgtctccgaaaatgaacgacgcagatgtctcgaagcaaatccagcagatggtgcggttcatccgccaggcagctgaggaa

SEQ ID NO: 12726 - DNA, 227 bp, Glycine max
  Clone ID: 701066144H1
gggttagtgtgttgaatgatgctctgaagagcatgtacaacgccgagacgcgcgggaagcgcaggtcatgattaggccatcctccaaggtcatcataaaattcctattggtcatgcagaagcacgggtacattggtgagttcgagtatgttgatgaccacagggctgggaaaatcgtggttgaattgaatgggcggctgaataagtgtggggttattagccctcgct

SEQ ID NO: 12727 - DNA, 249 bp, Glycine max
  Clone ID: 701066147H1
gggaaaaattaattctcaaggatccacaagatccttccactccaaatgcagtttcatacaaaacagcagcgagagagaaactgataaggcagggatacaacattgttgggatcattggagaccaatggagcgatctcctcggaggccacagaggcgaaagcaggacctttaagcttcctaatcccctgtactacattcagtagttccttcacctctcaacaatctagcttgctcctatctatctatatg

SEQ ID NO: 12728 - DNA, 116 bp, Glycine max
  Clone ID: 701066149H1
ggattttactgcttcctggtgtggtccatgccgttttattgccccagttctggcagagattgctaggcatactcctcaagtgatcttcctcaaggtggatgtggatgaagtcacgc

SEQ ID NO: 12729 - DNA, 117 bp, Glycine max
  Clone ID: 701066150H1
gttccctctccgaatgaacactggctatggtgcccgtagtccggaggtgaaatgcgcaagttggaggcttgctgtggaagcacacaacatctttggctttgagactattcctgaaga

SEQ ID NO: 12730 - DNA, 113 bp, Glycine max
  Clone ID: 701066151H1
gttacttcaaagtagcttgtcttcacattattaccgtatgtttatgtttagctgcgatttagtgtcttgctcgagcaaaaaatgagaggtctgaataaatcggtttctgaaac

SEQ ID NO: 12731 - DNA, 118 bp, Glycine max
  Clone ID: 701066152H1
ggatttcaggagcacttgctcttcctgccgcagcttacatgttccaagatcaggaggcgcgcgcagtgcagctggagcgcactttcattgccattaagcctgatggagtgcagagagg

SEQ ID NO: 12732 - DNA, 119 bp, Glycine max
  Clone ID: 701066153H1
ccgctttcatcttctcatctcttctcttttccctgctaatcatggcaaccttgtcaactgtgaaggtttccccccattgcatgtttcaaacagcaagcaaaaatccatccactgttgcc

SEQ ID NO: 12733 - DNA, 181 bp, Glycine max
  Clone ID: 701066155H1
gcttccagaaggacatattgaacttggtctatatctgtgagtgcaatggccttcctgaggtggccaattactggaaacaggtcatcaaggtgaatgactaccaaaaaatgcggtttgtgaaccgcgtggtgtcgtcaatgttcaacacagtctcagggaagaagattgctattttgggatt

SEQ ID NO: 12734 - DNA, 117 bp, Glycine max
  Clone ID: 701066156H1
gagaatgcttctcaagatactgatacaagaacagccaggtccttgtttggaactcctgtatcatggcatgctacactggagcaggttccttcaggatcgccaacaattattattgcg

SEQ ID NO: 12735 - DNA, 116 bp, Glycine max
  Clone ID: 701066157H1
gaaattcgaagtagttctcacaaaggactcagtgtgccagatgcaagccttgttcctgtatcatctactattgatgtcattgaactaatgaaccttgggcaaaggaaccgtgcagt

SEQ ID NO: 12736 - DNA, 146 bp, Glycine max
  Clone ID: 701066158H1
caatctcaggcataaggctcccgcgtcgcaccccactcctcccctccaaaccctcccagccacgctccctcgcacgtgaggctcttgcgtcgcagcaacaactccgcaatacttgactcgagaatgagccattcattcattcaagg

SEQ ID NO: 12737 - DNA, 161 bp, Glycine max
  Clone ID: 701066159H1
agctgctacagttacagcataacttctattctatatttctttctactcgcaagcaaatcagaagaagagaatggcagcagcagaggggctaaacagagagcagtacgtgtacttggcgacctgtcggagcaggcggacggtacgaggagatggtggagtca

SEQ ID NO: 12738 - DNA, 196 bp, Glycine max
  Clone ID: 701066161H1
tggactcatggtcattacaagcaccttagtgttcaatattgctttcgggtgtctcattaaccctgaagctaaattttaagacaacatttgatacccctcgaacaacggtgcagtttattttaatcagtgtgtcatgtccaaaagtttgctagcagatgtgtattagtgtttgatgtgtacaataatacaagatatc

SEQ ID NO: 12739 - DNA, 257 bp, Glycine max
  unsure at all n locations
  Clone ID: 701066162H1
ttaccttcttccaagaaacacaacaaacgaataaaagaanaaaatcaaggtagagagaaagatgatcaggttccgctcaaagacgttttcaagaagcagctccaagcctgcaaacaatgggagcaaagcagcatcatcatccccagaaaaggattgcaaaagtattggtgaaatcaagtcggaacttaggcctggtggcatgcttgttcagaaaagggagcctaatcaaagttctgggcaaggggagatcactataa

SEQ ID NO: 12740 - DNA, 183 bp, Glycine max
  Clone ID: 701066163H1
gatagctatagttttaaaattaaccatcgatttagttgcaactggaacacaggtttctttcaatgaaataatattaatatcaatttaataagctggtaatgtaaaatactgctaatgttaatatgaagtttggatggtcttaattggcgaagatgctaggtggtgttcatcaatattctgaaa

SEQ ID NO: 12741 - DNA, 259 bp, Glycine max
  Clone ID: 701066164H1
agcaaatatggaatctgaagcactgatatggggtgacaaactcatactgaagggattgtcattccgtggttttcatggagcactaccggaagaaaggaagctaggccagaagttcgtggtagatgttgatgcatggatggatctgaaagcagctggcaaatctgatcacttatcagatacaattagttacacagatatatatgatatagctaaggaaattcttgaagggtcacctcaaaaccttctggagtcagtggca

SEQ ID NO: 12742 - DNA, 124 bp, Glycine max
  Clone ID: 701066165H1
tgccgagaaaaccctaattcgctcgtaatcacccaagaggcgaatccttaccattgctcgagatgggtgaagaagtgaaggccgtggttccagattctgttttgaagaagcagaagatagagga

SEQ ID NO: 12743 - DNA, 148 bp, Glycine max
  Clone ID: 701066166H1
tgggattggaactcacgtctcctttgtagagcttttaggtttagtggagagcttgaaaggcataacctcagactatgtggcttctccatgtgtgttgaaactgtatcaaggaggacagctagaaatgttcaataatagtgattaccaa

SEQ ID NO: 12744 - DNA, 202 bp, Glycine max
  Clone ID: 701066167H1
gttacattgcaatgttttcatgctttcttaccgaggttatggagcaagtgacggctatccttctcaacatggaataactaaggatgctccggctgcattggatcatctttcccaaaggtctgatattgacacatctagaatagttgtgtttggacgatcacttgggggtgcagttggagctgtactaacaaaaaataaaccc

SEQ ID NO: 12745 - DNA, 148 bp, Glycine max
  Clone ID: 701066168H1
tcgagataactagaaacagtgtgatgaaaatgaaggtccttgttttcttcgttgctacaattttcgtagcatggcaatgccatgcgtacgatatgttccctctccgaatgaacactggctatggtgcccgtactccggaggtgaaatg

SEQ ID NO: 12746 - DNA, 148 bp, Glycine max
  Clone ID: 701066169H1
tcttcttctatgggttggcttagtcggttcataactgccgtggctttcttagccatcggagtgatattctcaccggagacactggggtcaaaatcaaccacactttccacctacctcaaactcgctcacctcctctgcttctccaccg

SEQ ID NO: 12747 - DNA, 153 bp, Glycine max
  Clone ID: 701066170H1
ctttctaaactaaccaactttttttcaaacaaattcgattctatcttcatttttaacctaattttcttttcgatccaaaaaatggctctctcgcgcgttgtttctcaatcgtcgcaatcgaatcttctgaaatccctagcgtcgtacttatca

SEQ ID NO: 12748 - DNA, 189 bp, Glycine max
  Clone ID: 701066172H1
gtcgcgttgtgttgcgtcgtgtcgtgcgctgttcctctgtttctcgtttttgtgttcagaccgaaccctagctccgcatcgcaaccatgtcgaccaagcaaggtggaaaagctaagcctttgaagaaacccaagtctgataagaaggattacgacgagattgatgtggctaacattcagaagaaaaagg

SEQ ID NO: 12749 - DNA, 180 bp, Glycine max
  Clone ID: 701066173H1
ctttcttgttgtatcaaaaaaaaagaatattataagacaacaatgcgctcatgatgaaactcaatacaaagcaccattcacactacactgactttcccttgctcaccaaacatacacctacaagcacagaattcaaccagtattaatattactttggaatatgaaacatatatgaactgg

SEQ ID NO: 12750 - DNA, 143 bp, Glycine max
  Clone ID: 701066174H1
tctctctctctcttgttacacattctacattctctctctattatttttcaccctttttctctcttttgcaaagaaaacaatttaattaagtcaatttgtaccaaaatggcttctcaagtttgtgaaactttggctttcatcaa

SEQ ID NO: 12751 - DNA, 110 bp, Glycine max
  Clone ID: 701066175H1
gggatccacgaggacacagcctcttagctggttctgaggatttcagcatttggatgtggaatactgataatgctgccttacttaaaacatttattggtcatggcaatagt

SEQ ID NO: 12752 - DNA, 135 bp, Glycine max
  Clone ID: 701066176H1
cacaaatcaaagccatggccacctccaacttctctattgttctctccgtctccctagccttctttttggtgctacttaccaaggcacactcgaccgataccgtttctttcaccttcaacaagttcaacccagtcc

SEQ ID NO: 12753 - DNA, 187 bp, Glycine max
  Clone ID: 701066177H1
cgattattgaacaagcggaagacagacacgcagtgtggaagatgccgacccgttgtgacatatgccccgagataatgatcgcgatcttgatccctcctctcggagtttgctttcgccacggttgttgcagcgtcgaattcatcatctgcttgctcctcacaattctaggttatattcctggtataat

SEQ ID NO: 12754 - DNA, 211 bp, Glycine max
  Clone ID: 701066179H1
ggaacagaagagacaagcaaagggctttgagttgttccaatggaagaagcgaaaccagcgatgggtcctcctcctcctcctgctcctcccactacgaagaagaggccactggaagactccaatgcccactccaattacttcaagattcgcgctgttattcgagaccttcgtcctcactttctcgaggttctccgaactccagactacaaaa

SEQ ID NO: 12755 - DNA, 254 bp, Glycine max
  Clone ID: 701066180H1
tctttacatgtgccaatccaatcccagccgtggtacattctcttggggccagaaaaaccatgaacacgccgtggcgtcggaattgtctgcgcgcgtgcgcacgtgtcgaacgctacaacaattttcttctccaattcaatactagtactataacatagacgattagacggtgtgttcttcttttaaacccttgtttcactttccgtttcatctttcttttttgttgctcagcaatccctcccatttgttttcct

SEQ ID NO: 12756 - DNA, 110 bp, Glycine max
  Clone ID: 701066181H1
tctatgtcttactccattttaaggaacaaaaggaacaaaacgtgactttttggctctacccctactttatcatcttgcaaccgcattgctcttgaaaaagaaagaagaga

SEQ ID NO: 12757 - DNA, 256 bp, Glycine max
  Clone ID: 701066182H1
cattgatttttcagtgtgctaatttctaactttgattggtcacttgtaattatagcttgtaaataccaaatcgtgtctttgtcatatgctgactctgatctttcctctgttcttttaggtgggcgattgtatatctggcacaaatgaaaccactcattgtacctatactgaacgagggcgaataattctttaaacagatgtagctccttgtaagttagagaatatggttcgcagattggctgctggattgaatttg

SEQ ID NO: 12758 - DNA, 103 bp, Glycine max
  Clone ID: 701066183H1
cgaggatcaaggtttacgagctgaggcagaagacgaaggctgatctgctgaatcaactgaaggacctgaaggcggacttgccttgcttcgtgttgctaaggtc

SEQ ID NO: 12759 - DNA, 80 bp, Glycine max
  Clone ID: 701066184H1
ctttttcccagtccaagcagcctccaattcgtgccactctcttcacaatggccgttaccttctcaaatctccacacagaa

SEQ ID NO: 12760 - DNA, 167 bp, Glycine max
  Clone ID: 701066185H1
cgcagtaatgggtgctctggatcacatatcggaactctttgactgctccagtggcagttccaagcacaagaagcgccgcaattgcagacggtggaggtcaaagtgaagatggactgcgaaggatgcgagacgaaagtgaggaaggcggtggaggggatgaaaggcgt

SEQ ID NO: 12761 - DNA, 233 bp, Glycine max
  Clone ID: 701066186H1
gattaatcaatggcagattaaagggttggtcccccgtagacgtcgtcttgtattgtatcatagaatcccgatgttttggtgcatagatgaatatcatagcactgaaaactcctcttttcaatacgttgtgtctttatttgcttgttgaatgttgagaaaccaagctatgcatccaaaacaacacaatatgttgagtagtaatcagcatcgagaaacaaagcttgaatattgaa

SEQ ID NO: 12762 - DNA, 163 bp, Glycine max
  Clone ID: 701066188H1
caccatcgcgcccaagagagagagagagagagaggcgcgaaaatgagcggacgctaggggaagaagaagggagcgagctttgtgatcgattgcgcgaagcggtggaggataaaattatggaaatggcttctctggaaagttccctcaggaggaggttaaggtt

SEQ ID NO: 12763 - DNA, 68 bp, Glycine max
  Clone ID: 701066190H1
ggtttttggggttgtgtttctcttgatgagagggggagaagggagggaggagaggaggaggagggggg

SEQ ID NO: 12764 - DNA, 249 bp, Glycine max
  Clone ID: 701066191H1
cccttattgatctttcagtgatagagatattgtcaaggcatgcttctgatgagatataccttggagagagggagactccaaattggactactgataagaaggcattagaagctttcaaaaggtttggaagcaaactgactggaattgaaggaaaaatcaatgcaaggaacagtgatccaagtctgagaaaccggactgggccagttcagctgccatacactttgctccatcgttcaagtgaggaagggt

SEQ ID NO: 12765 - DNA, 224 bp, Glycine max
  Clone ID: 701066192H1
gtgcagtgggcgttggggaaggctggtgaggatcgcgtccacgtggtggtgtcggaggagcttggatggttgttcgtcgggatttacgacggtttcaacggcggcgacgcgccggagtttctgatggggaacctctcccgcgccgttcataacgagcttcagggtttgttctgggaacttgaagaagaagaacagccgttaccgcaagacagcaatccagtggt

SEQ ID NO: 12766 - DNA, 244 bp, Glycine max
  Clone ID: 701066194H1
caactcacacactttgtactctccgtccttccttcttcgatccagatctctctccttctccctcaaatggcttcccttctgcaatgttccatgcccctcgtctctctttccaatcgagctctggtacccggtaccaggatctccaacccaagttcagtttccctttcaattaagggaagaagtttcccatccgttacattgcagcccagagggcgtcggtttcagcttagatgtgcggaaaacc

SEQ ID NO: 12767 - DNA, 68 bp, Glycine max
  Clone ID: 701066195H1
tacttatccctctctctccatcatcatctcgttttcttctaccaagctagcttcctagcttcttcatg

SEQ ID NO: 12768 - DNA, 288 bp, Glycine max
  Clone ID: 701066201H1
caattttgtaggatttggagtttgtacaatttcacccaaccggtatactctggagcaggttgccttatcacagaatgatctcgtggtgaaggtggaattcttaggaatagtgagggtgagcgatttatggaacgatatgcccctactgcaaaggatcttgcatcaagagatgtagtttcaagagcaatgacgatggagattcgggaaggtcgtggtgtaggacccctgacagatcacatctatctccacttgaatcacttgcccccagatgtgctcaaagagagactt

SEQ ID NO: 12769 - DNA, 285 bp, Glycine max
  Clone ID: 701066203H1
ctgagtttccacactgcataccttaggtcttccgaattcgaagttaatttgcaagatggctaaggaaaaggctcagatcaacattgtggtggttggtcatgtggaccctgaggaggcaaccaccattaacgagctgaagaagcctgttgtggagaaagaagctccagggcatgccatatgagggcatgcacgtacggcctcggaggggaaccagaaaattatgttaacaaaataatctggaaccctaatgtatcagtgtcatcatcagtgtgtagtttaagctag

SEQ ID NO: 12770 - DNA, 282 bp, Glycine max
  Clone ID: 701066206H1
gggagagaactggtggacctgcgaaaggagagtcgatgggagtttctcaatacactgttttctgtgtctgaagctgtggcctacatgcagatggttgacagattggatgatggaactataccggcagatcttgcttctgattataaagggctatataaggctgttggaaaagctctcttctgggcacatgttgaaggtcgccttaagagtgagatcatgtctaagcctgaactgtttgtggagcctgatccagaattacctttggcacttttggatcagaag

SEQ ID NO: 12771 - DNA, 282 bp, Glycine max
  Clone ID: 701066207H1
ctcgctacttgttaagggctgcactataccagaatgtctcagggaagaggcagtgcatctttgcctattgtggtcactgtggtttcactactgtgccttttggaacgtgctaacgcagcaacttactccgttggaggacctgggggatggaccttcaacactaatgcttggcccaatggaaaaagattcagagctggtgatatcctaatcttcaactatgactcaacgacccacaatgtggttgctgtggacagtcgtggatacaacagctgcaagacacca

SEQ ID NO: 12772 - DNA, 281 bp, Glycine max
  Clone ID: 701066208H1
ctataagctagtttatcgtgaggagaatatgaagttgtttgttttctttgttgctgcagtagttttggtagcatggccatgccatggcgcaggctaccaaaggttccctctccgaatgaaaactggctatggtgagcgttcttcggaggtaaaatgcgcaagttttaggcttgctgtggaagcacacaacatccgagcctttaaaaccattcctgaagcgtgcgttgaaccaacaaaggactacattaatggcgaacaatttagatcagactctaaaacag

SEQ ID NO: 12773 - DNA, 281 bp, Glycine max
  Clone ID: 701066209H1
gaagaacttgaacgctccgacgcggacatacgtgcgcgacgcgaaggcaatggctgcgactcctgcggacgtgaaggagtaccctaactactacgtgttcgtgatcgacatgccaggcctgaaatccggggacattaaggtgcaggtggaggatgataacgtgcttctgataagcggcgagaggaagagggaggaggataaagagaaagaaggggctaagtatttgaggatggagagaagggttggcaagttcatgaggaagttcacgcttcccgagaatg

SEQ ID NO: 12774 - DNA, 112 bp, Glycine max
  Clone ID: 701066210H1
gtttcgtctggatacttacaacgtaacaacataatgttgcgaattgcctgcaattgctcttatggttgcgtccgttgcatctcattagctgtttggggtctagtcttagttc

SEQ ID NO: 12775 - DNA, 276 bp, Glycine max
  Clone ID: 701066211H1
cctttgttcactcttcttctcttgcggctagggttttagcgcagttcttctagatttaaggaagatgggtaaggaaaaggttcacatcagtattgtggtcattggccatgtcgactctgggaaatccactaccactggtcacctgatttacaagcttggaggcattgacaagcgtgttattgagaggtttgagaaggaagctgctgagatgaacaagaggtctttcaagtatgcctgggtgctggacaaacttaaggctgagcgtgaaagaggaat

SEQ ID NO: 12776 - DNA, 276 bp, Glycine max
  Clone ID: 701066212H1
ctttgtgttagaatcatcatgcgtttgcaaaaccaattaaacgacgtgtcgtcgggttcgattccgcttctggtgttggcgcagatagccacctgcgtcaactacctccgctccatgcttttcgcgcttttgcaaaccctaggtctcagccgattccactccgaccagatcgccgacgagcgcttcctcgccgccgtcggatccggcctcgccggacttatcatgcactccgatcagctcaccctcagcagccaattcttccaccatcaccacggc

SEQ ID NO: 12777 - DNA, 282 bp, Glycine max
  Clone ID: 701066213H1
agccgatgccaaacttgctgtgaataagaagggcgccgccaccaagactaggaaacccgccggaaaggggaaggcagcgaaagatcctaacaagccaaagaggcctccaagtgctttcttcgttttcatggaggaattcaggaaggtgttcaacaaggaacatcccgacaacaaagcagtgtctgctgtgggcaaagctgctggagcaaaatggaagacgatgtctgatgctgaaaaagcaccttatgtggcaaagtctgagaaaaggaaagtggagtacga

SEQ ID NO: 12778 - DNA, 282 bp, Glycine max
  Clone ID: 701066214H1
gctataagctagtttatcgtgaggagaatatgaagttgtttgtactccttgttgctgcagtagttttggtagcatggccatgccatggcgcaggctaccaaaggttccctctccgaatgaacactggctatggtgagcgttcttcggaggtaaaatgcgcaagttttaggcttgctgtggaagcacacaacatccgagcctttaaaaccattcctgaagcgtgcgttgaaccaacaaaggactacattaatggcgaacaatttagatcagactcctaaaaca

SEQ ID NO: 12779 - DNA, 283 bp, Glycine max
  Clone ID: 701066215H1
tgaagaaccaacaagaggggtattgagattgagattcaagtaatggggaagagcaaggttcttgtggtggggggaactgggtacatagggaggaggatagtgagggcaagcctggcactgggccatgagacctatgtggttcagaggccagagttgagcctccagatagagaagctgcagaggctcctctccttcaagaagcaaggtgctcatctcattgaggcctctttcaatgatcacaagagccttgttgatgctgtgaagcaggttgatgttgtcatca

SEQ ID NO: 12780 - DNA, 282 bp, Glycine max
  Clone ID: 701066216H1
cacaaatcaaagccatggccacctccaacttctctattgttctctccgtctccctagccttctttttggtgctacttaccaaggcacactcgaccgataccgtttctttcaccttcaacaagttcaacccagtccaaccaaacattatgctccaaaaagatgctagtatttcatcctctggggtgttacaactcaccaaagttggcagcaacggcgtgcccacctcgggatctctcggtcgtgccctttacgctgccccaatccagatttgggacagcgaaa

SEQ ID NO: 12781 - DNA, 271 bp, Glycine max
  Clone ID: 701066217H1
tctaagcagcggctaccctaatcctctcctcttcctctctactaatttcagctatggccgacgaagctgtggttgttccagatcccacccagatcgatgtcaagctctttaaccgctggagcttcgacgatattgagattactgacatttctctggctgattatatcggagtggcgacatccaagcacgccacgtatgtgcctcacaccgccggcaggtactcggtgaagcggttcaggaaggcgcaatgccccattgttgagaggctgac

SEQ ID NO: 12782 - DNA, 133 bp, Glycine max
  Clone ID: 701066218H1
cacacacactctttctctctctctctttccctgatcatcaaaatcagaaaaaattgggggaatggagaccaacaaccagcaacaacaacaacaaggagctcaagcccaatcgggaccctaccccgtcgccggc

SEQ ID NO: 12783 - DNA, 285 bp, Glycine max
  Clone ID: 701066219H1
ccgccacttctgaatctattgaatcaacaatcatgtcggacgaagagcaccatttcgagtccaaggccgacgccggagcctccaaaacctaccctcagcaagccggtaccatccgcaagaacggctacatcgtcatcaaaggccgcccctgcaaggttgtggaagtttcgacttccaaaactggaaagcacggtcacgctaagtgtcactttgttggaattgatattttcactgccaagacacttgaggatattgtgccctcttctcacaactgtgatgttcctc

SEQ ID NO: 12784 - DNA, 282 bp, Glycine max
  Clone ID: 701066220H1
gagagagggagattctttgtttgctaccttctctcggaaaaatggttacgttcaggtttcaccagtaccaggtggttgggagggctcttcccacggaagcagatcagcaccccaagatctaccgaatgaagctctgggccaccaacgaggttcgcgccaagtccaagttctggtattttctgaggaaactgaaaaaggtgaagaagagcaatggccaagtgcttgccatcaacgagatttttgagaagaacccaaccaaaattaagaactatggtctatggt

SEQ ID NO: 12785 - DNA, 278 bp, Glycine max
  Clone ID: 701066221H1
ccaaagctaaggagatcgtgtcgtccaattccgtcgtcgttttcagcaaaacctattgccctttctgcgtcgatgtgaagaagctcttcggtgacctcggtgccaattacaaggccatcgaactcgacactgaatccgatggaaaagagctccaagcagcattagttgagtggacggaccagcgaaccgtgcctaatgtgtttattggtggaaaccacattggtggctgtgactcaacaactgccctgcacactcaggggaagcgggttcctctgctg

SEQ ID NO: 12786 - DNA, 277 bp, Glycine max
  unsure at all n locations
  Clone ID: 701066222H1
gagtccgtgacacacttatccacctactttcattaatcntactcttctcagtccaaaacagtttctcgttttctcatctgaataatgaggagcatctttgtccttctccttgttctgggtttgtttaagtatgcatttgctgaagaagggttttgctctgctccttcgtaatcgaaatcaaagcctctttattggaaagtggataaccccactctctcacctatccacctttaagatttgcctggattcacacgcagtgtttatcagagtaatccat

SEQ ID NO: 12787 - DNA, 274 bp, Glycine max
  Clone ID: 701066223H1
gtgaaacaacagctttcatggttccattggtggctggtgatggaaccaaaactcaggcacttgctatttgccactcaaatacttctggaatgaatcatcaaatgcttcatcaacttatgggagtagatcctggaactaaccctgtttgccatttccttggaagcaaggccattttatgggtacccaatttatctgtggacactgcctatcagaccaacattgttgcttaattagtccatgcatcttgagcaccatgagaatgagattgtgtata

SEQ ID NO: 12788 - DNA, 278 bp, Glycine max
  Clone ID: 701066224H1
cgcacgaatatcttgttgtttggagcgatccgagaaaaactctgtaaacatgttggtttaccaggacctccttacaggtgatgagcttctctctgactccttccgttacaaggaaattgagaatggaatgctgtgggaagttgaggggaagtgggttgttcaaggagcagttgatgtagacattggtgcaaacccttctgctgagggtggaggagaagatgagggagttgatgatgcagctgttaaggttgttgacattgttgacacattcagacttc

SEQ ID NO: 12789 - DNA, 274 bp, Glycine max
  Clone ID: 701066225H1
tgtcagactaaattatttccttgcagttggttctcttcatgggtaagaagttttcatggagttttcgttgcatttgagcaattcaaccttgtaaaaataaataggctttccataaaccaaatgttacttttaaatgcccaaagcttatcaagcctcttttcttgaatggggattggcactctttattgaggttttgacatgagacattttatatcttctgatttgatttgatggatattttctgcaatattcccttaatattttctggtttgat

SEQ ID NO: 12790 - DNA, 197 bp, Glycine max
  Clone ID: 701066227H1
cgagagggcaggacagaagagaggaagttttggcgtttgaatctctagaatagaatcaaaccaaattgaaagaagatcgatcgatcgatcgatggctctggtcggagctgaagtgacgcatgcggcggagggcgcaccggaggagaattgctccgccaagcccaccaagcagggcgagggcctccgccactactatt

SEQ ID NO: 12791 - DNA, 278 bp, Glycine max
  Clone ID: 701066228H1
cggctcgacctcgaccgaatcggctcgagtcatcctacaaggacttcagtgtggatggttgccagtgaccagacccataccctgcctgtgtctcaaccacaaccaaaaattggtgggatcagtatgatgcttggcacctttctgatgatcagaaaaaggattatgcttgggttcagaggaaccttgttatctatgactactgccaggattctgcacgttatccaactaccccagaggagtgttcattgagtccatgggattaatatgtctaggggaaa

SEQ ID NO: 12792 - DNA, 284 bp, Glycine max
  Clone ID: 701066231H1
aacaaatttccaaacagagaaggggcaacacaaaaatgaagaagggtctctcctttgtgctgctgctgatccttgtgatcatccactacaaggtagtcaacgccaacaacaacaactgtgttacagaggattgcctcattggtcatagtttggagtcagagttctcgtttggctcccatgtggcaagaatgctctatgatgtgagccaatctgtgtctggccaaacagggaatagcaacaatgctgctgttaattgtccagaaagcaatggttatcgtagctgc

SEQ ID NO: 12793 - DNA, 70 bp, Glycine max
  Clone ID: 701066232H1
ctgctcattctgctcgacgctttggtctggggttcaagtgcaaaacacaagcctcaaagagttggcaagg

SEQ ID NO: 12794 - DNA, 289 bp, Glycine max
  Clone ID: 701066233H1
cgtacagatacacacttggctgaggaaggtcggaaaagaaaatggccttgttcttctacacggtgttcggtcccctggccgcggttgtggcagttatggagctgagcaagaacaacaaggatcgaatcaacacctcttccgcattcaattccttcccgaacaactacctcctcgtctattccctcatgatggctggagattggctacaaggtccatatgtctactacctttacagtacatatggatacgggaaaggggacataggacaactcttcattgctggttttgg

SEQ ID NO: 12795 - DNA, 284 bp, Glycine max
  Clone ID: 701066234H1
ctcttaataccaattttctagggtttatacaattctcgatggcatcttcagatgttgagtaccgttgctttgtcggtgggctcgcttgggccactgacgaccaagctctcgagagagccttctctcagtacggcgaaatcgttgaaacgaagattatcaacgatcgtgagactggaagatccaggggttttggatttgtgaccttcgcctcggagcagtccatgacagacgccatcgaagggctgaacggccaaaaccttgacggccgtaaaaatcatgttaac

SEQ ID NO: 12796 - DNA, 283 bp, Glycine max
  Clone ID: 701066235H1
cgatgatcctgttcaaactgcaacaatgcgtgctgaacttcatagacgtggtatagcacaaatgaggatcaacaatcggtcacttcaagacatgtatatatttggagatcctttgcgtgttcctattattattgttgaacgcttggacaacatgtaccgttctgccagtgtgaagtcatatttccttcctttggaggacaaagctagacatatgctggaaaatggatctagagccataataccgttggctaggaatagcccacaacaaaatgagcatgttttg

SEQ ID NO: 12797 - DNA, 280 bp, Glycine max
  Clone ID: 701066236H1
cttaaaccctagcccctcttctcttcattcttcactcaggaaacaattctaatggccttctgtaataaggttggaaacgtcttgaggcagggtgctgctcgcagcacacaagcacctgtttcatccatgcttaattacattcgctgcatgtcttcaagcaagctttttattggaggcctttcatatggagttgacgatcagtctcttaaggatgcattttctggctttggagatgtggttgattgaaatcttctaactgacagagactctggaagatcaa

SEQ ID NO: 12798 - DNA, 278 bp, Glycine max
  Clone ID: 701066239H1
cggcactgcagcgtggacggaatcggagtgcagccatatcagcagcagcagaagtccttgaagtgctgctctagtttgaggcacaatgagattggagaaatgctggttttgctcttcaaccatataccctggacatggaatccagtttgttcgtaatgatgcaaagattttccggttttgtagatctaaatgccacaagaactttaaaatgaagagaaatcctcgtaaggtaaaatggaccaaggcatatcgtcgcgtgcatggaaaggatatgacac

SEQ ID NO: 12799 - DNA, 277 bp, Glycine max
  Clone ID: 701066240H1
gtggaaggtggcggtgccatggaattggatttggaggccaatggcttctccgcctctaactgccttcacatgccaaaatctccacacgctaaaccctatgcctcgatgtcgcagcttcaagcttttctgtcgaccttctttttccgccgtcgcgcagcctcgcctcctctctccggcgaccttgaccgctacctccgctgctccatgccgcagaactcgccgcttcgagtcgccgttctcgtcagcggaggcgtcgatagcagcgtcgctctccggc

SEQ ID NO: 12800 - DNA, 276 bp, Glycine max
  Clone ID: 701066241H1
ggaaaatgtgcctacaaatagctccctgaaagcacatccacgctttcaagccgagaacttagacaagaacaagaatatatatgaacgaattgaaggccttgctacgaagcatcaggccactcctgcccagttggcattagcatgggtacttcagcaaggcgaggatggtgtacctatccctggaacaactaagattaagaacctggatcagaacataggtgccttagcagtgaaactgtcagacaaagacctgtgagaactttctgaggcggttcc

SEQ ID NO: 12801 - DNA, 275 bp, Glycine max
  Clone ID: 701066243H1
aactcaacctgtgacagtttcaaatgagtgaagcaacggcaagattcgaacggcgggtcctggtggcggtggacgaaggcgaggagagcatgtacgctctttcttggagcctcaggaacgtaattttccaaaattccagagatacccttatccttctttacgtcaagccccctcatgccgtttattcccccttagattccactggcaggatagatgatcctgaaactccaggatatttgttttcgccggacataagtgcggccatcgagaagtac

SEQ ID NO: 12802 - DNA, 269 bp, Glycine max
  Clone ID: 701066244H1
aaagatggaaaccatttccaaatttccctgttcacatcaacctgtaagctccattagtttccctcctagggtacaccccgtttctcacagagttgaagcacttctaaaccacctaaaacctcatcattctcagcctatctcaatcactacttgtttagaagctgagacaattcagagcgacttagttgtgcttgctgagttgtacaactgcatggacgaacttttccattctccacaaaccatacaaccccttctacgctaccaagatg

SEQ ID NO: 12803 - DNA, 278 bp, Glycine max
  unsure at all n locations
  Clone ID: 701066245H1
cggctcgatgtttctctcaactcagaaatcgtgtcttcactcttcacttagctacgaaccccntgaatgnctgnaagcaaatccggttcaagaaagcgagcatccgaatccgaacgcgcaaaatctgacaagaacaagcgatcagccacggataacttcgatctcgatttggatttcgatctctcagatgacatcaaaggaatcgtctcggcgctgcaccttatcagagacaaggctcagaaggacggtcagaagaagaacgaagagactatttccag

SEQ ID NO: 12804 - DNA, 277 bp, Glycine max
  Clone ID: 701066246H1
attcaacaaacaacgcaatgcgtattccgtcggaactgagggacatgttgttgcccaacaaaaagggcgtcctcgttgcctctcccgcagaggacaggaagactttgaggtccaagcaatgcactagggaaggtgtgcgagctggattcaaggctgcttccattgctggtgttgccagtgctgtgcctacattggctgcagttcgtatgattccatgggcaaaggcaaacctcaattatactgctcaggcacttatcatatctgctgcatccatcgc

SEQ ID NO: 12805 - DNA, 271 bp, Glycine max
  Clone ID: 701066247H1
ctctcagtgaccagagacagatgattttggagatggcgaatgaaacgctgtcgttgcggcactcgcggcgttggtgctactcgcggcgagtgtggcggtggatgctcaggagaactcggacgtgaagacgctggtgaagtacaagcacgggaagaagtactgcgacaaaggatgggaatgtaagggctggtcaatttactgttgcaccctcaccattaccgattatttccagacctaccagttcgccaatctgttctccaagcggaactcg

SEQ ID NO: 12806 - DNA, 285 bp, Glycine max
  Clone ID: 701066248H1
agtggtttcagtgagtgatcggtgttcacttgatccttcataagtcgtcatcatcatcatcatcatcaccgttgattgaagaagatgccgatcagaaacatcgccatcggaaggcctgaagaggctactcaccccgacacgttgaaggcggggttggctgagttcatctccaccttgatcttcgtgttcgccggttcaggttccggcatcgcctacaacaagctcaccgacaacggcgccgccactcccgccggcctcatctccgcttccatcgcccatgctttc

SEQ ID NO: 12807 - DNA, 256 bp, Glycine max
  Clone ID: 701066249H1
cacaggcacgctgagcatggaacacagaaccctagaactcaacctggcttcagcaaaggatctcaaagacttgaatatattctcaaagatggatgtatatgctgtgctttcactctccggcgatcaaaagaccaagactcccgtccacagaaacggcggcatcaaaccaacatggaattttccggtcaagttcacttttgatgaatcggtggcgcggcagaaccgtttgggccctcgaatcaagatccgctccgag

SEQ ID NO: 12808 - DNA, 284 bp, Glycine max
  Clone ID: 701066250H1
ggctagataagcttccagtcattgtatggatgatagctcaggctgctgtaggagatctctcagtaggtttgtatgcttgggcacggaatctcctagccatagttattggcaaaagtggtaacccccaatccagggatttggttttgcagctagtggaaaaaattttgtctacccccaaagcccgacctgttttagtaaacagtgctgtgagaacaggggaacgattaattccttcttccgcgtttgaaattttggtccgggttactttccctccatcttcaact

SEQ ID NO: 12809 - DNA, 277 bp, Glycine max
  Clone ID: 701066251H1
gggagaattaggtttttagggtttacaccgagcagccacacctcccgcagcagccatggttctcaaaactgaactatgccgattcagtggtgccaagatctacccaggaaagggcatcagatttgttcgtcgtgattcttaggtttttctgtttgctaactcataatgtaagatgtattttcacaatcgcctgaagccttcaaagctcacctggactgcaatgtacagagagcaacacaaaaagggtattgctcaagaagctgtgaagaagaggaga

SEQ ID NO: 12810 - DNA, 258 bp, Glycine max
  Clone ID: 701066253H1
tgataatgaagaccattatgcaaaactacttcgagctcaaacccacatatttgatcaaactttcggattcataaactctatgtcccttaaatgtgcaattgatttgtgcatacctgatgtaatacacaagtatcgccaacccatgcgcctctctcaactcattgcttcacttccaattcacccttctaaggcttgcttcattttccgcttgatgcaaattttgactcattccggtttcttctctcaacacaataatgc

SEQ ID NO: 12811 - DNA, 278 bp, Glycine max
  Clone ID: 701066255H1
ccctagttagcctctttttgtctcccctgcaatcaacggcaccccccacaaaaatgacaggagagacagtgaacccaaaagcttaccctttggccgatgcgcaactcgcaataacaatcttggatcttgtgcaacaagctgccaactacaagcaactaaaaaagggtgctaatgaagcgactaagacactgaacagaggcatttctgagttcgttgtgatggccgcagacactgagcctcttgagattcttctccatcttcctctccttgctgaggat

SEQ ID NO: 12812 - DNA, 278 bp, Glycine max
  Clone ID: 701066256H1
ctcattgactctctctttctctctctctctgcacagtgccaatggcggatccaatcgcgaaggctctgatcgcgtttgcgctcttagcttcccttttgctgtgcttgcaagcttcctccgatgtccccttcatcgtcgctcacaaaaaggcctccctcaacagactcaagtccggcgccgaaagggtctccgtcaccatcgacatctacaaccaaggaacctcgacggcctatgatgtaagcttatcagacgatagctggccaagtgatgcttttgat

SEQ ID NO: 12813 - DNA, 273 bp, Glycine max
  unsure at all n locations
  Clone ID: 701066257H1
cttccacgtcaccancacccccgaaggtggcgcgtgaggctgttaccggcgacctataccggcgcgctgagtgacgatcaaggaaatgggtcagaggctaagctgcgtgcaacagcagcacgaggagcatggtgtgctcttcccagcacttgcaagtggagaattggaggttgttgaggccatggtggaggaagaccccactgtgttggaacacaccactggctgtgaccgcctttctcctctgcatgtagctgctgccaatggtcggatcga

SEQ ID NO: 12814 - DNA, 278 bp, Glycine max
  Clone ID: 701066261H1
gttgtatagaaacaaagtaaaactattaattactaagttgcagtataaaatatgttggttttgtagagattcgtatttcaggtttgttttctggtggacttggccaagtgaataaaaaatgtgtcaaatatgtcctatttcttattcccttttaccatttcaagttgcttagagatatgtgtttttctttttttagttttttagtgaaagaaattggaaccaacgacttctccttcactccttctgccttcaaccactgaaccaaccttataacttag

SEQ ID NO: 12815 - DNA, 274 bp, Glycine max
  Clone ID: 701066263H1
ggcgaacgaaacgctgtcgttgcggcactcgcggcgttggtgctactcgcggcgagtgtggcggtggatgctcaggagaactcggacgtgaagacgctggtgaagtacaagcacgggaagaagtactgcgacacaggatgacaatgtaagggctggtcaatttactgttgtaacctcaccattaccgattatttccagacctaccagttcgagaatctgttctccaagcggaactcgccggtggcgcacgcggtcggattttgggactaccact

SEQ ID NO: 12816 - DNA, 94 bp, Glycine max
  Clone ID: 701066265H1
gtgaaatatagacactccttgggcttcatattgcttgaataaatctgttctatatcgtaaaacaaaaactgcgaaagaaaaaaaaagaaagaaa

SEQ ID NO: 12817 - DNA, 281 bp, Glycine max
  Clone ID: 701066266H1
aaaggttccaaaaaccattgtgaagagtctctagttacaaatacacaagttaacagtgacttcgaacccataccaagtgttaccaaatatgatgatttggaattcaagtcaagcattatcaagaacgatgattttgaatcgagaccaagtgttactaagtatgatgattttgaactcaagtcaagcgttaccaagaacaatgattttgaaccgagaccaagtgctaccaaatatgatgattttgaactcaggtcaagcgttaccgagaatgatgattttga

SEQ ID NO: 12818 - DNA, 279 bp, Glycine max
  Clone ID: 701066267H1
gcagggattaattatgaagtaggtaatatgattgctgaagcattgagcagagttggtagaaagggtgtcgtgacccttgaggagggaaagagtgctgataacagtctgtatgttgttgaggggatgcaattcgaccgtggttatattcctccatacttcgttactgacagtgagaaaatggctgttgagtatgagaactgtaagttgctgttagttgacaaaaagataaccaatgcacgggatcttatcaacatactggaggatgctattagaagtgga

SEQ ID NO: 12819 - DNA, 276 bp, Glycine max
  Clone ID: 701066268H1
gaaagattactaaatggtgtcataaggcagaagttgaagatcattcctgagaatgttacgtatgcagtgcagtccttggatgctttcgaaagtctagtacctgattttatgaagccaagaattagtgaggttgatgagctgctggctcttggggtcaacgtgactgtgtacagtgggcaagtggatctcatttgtgcaaccaaggggactgaagcttggcttaaaaaactcgagtggacagggcttcaaaatttcttggagaaagacagaaccccc

SEQ ID NO: 12820 - DNA, 276 bp, Glycine max
  Clone ID: 701066269H1
ctcgagcccttttatttgcatcttcaatatacaagactgaaactttcaaagctcttttgagacattgttattgcaatgactgacatagatcgctcctctgataatgtttcttctgattctattgagaaatcaagccaagtttctgatgttgaattttctgaagctgaggaaatccttattgccatggtgtataatctggttggagaaaggtggtctttgattgctggaagaattcctggaagaactgcagaagaaatagagaaatattggacttca

SEQ ID NO: 12821 - DNA, 275 bp, Glycine max
  Clone ID: 701066270H1
gttcagaaagccgcttccatgagcgcgagacaccaatggagagcaatgtcgcaccaccagcatcagcctctgtgcacgcgcacgcaccagatcggcgccctcctcctcgtggcgaccaccttcttcttcacgagaatgctttccacctccacgctctcccacagcgtcgtccacgtgtcgcaaccccggttccagtgggggcagtcccagctatccctcaagatctacgtctaccaagaagacgaaatcgacggtttgaaggagctcttgcgcgg

SEQ ID NO: 12822 - DNA, 276 bp, Glycine max
  Clone ID: 701066271H1
attcaatcaaaatgtctcccaaatacaagctagtgctgttgatagcattggttttggttgcaacctcccttgctggtcgcacaaaggaacatcctaagcatcctccatcccttcaagaacaacaacacaccccacaccttgctagctacccgccaaagcatagaccgaaaccacctcatcctgtacatggtgccggggaggaaccaacctccattcctcgaaagaagggaccaagaaggcctccgaactgatgagtgagtcaaaggtttcagattg

SEQ ID NO: 12823 - DNA, 278 bp, Glycine max
  Clone ID: 701066272H1
atttactgctttatggtgccaaatcaggaccagtacacaacttgccagaaaatcattcatggcagtgaaggaaagcaacacaagccaaaatattcagcagcagcagcagcaacaacaagaagcttgtgatccttgcaagtcttttggccaaaagtgcagccacattgtcaagaagcagcgtgcaaaattctacattcttcgccgctgcatcgccatgctcttgtgttggcatgagcgtggtgacacataataaggcctgccacacagtatcatccttt

SEQ ID NO: 12824 - DNA, 143 bp, Glycine max
  Clone ID: 701066273H1
cggctcgagctcttggctcttgctttccttcttcaccatgtcacttgctgggcacatcaccactgaaatcggggttcatgctaccgctacaaagtggttcaacctcttcgcaacacaactcgatcatgttgaaaacctagctg

SEQ ID NO: 12825 - DNA, 275 bp, Glycine max
  Clone ID: 701066274H1
ctcttttgctttaccaaattccattttccaattcaaaaccctaactccgttcgaagcaccaaatcgtgatggcaccaaaggcagagaagaagccagcagagaagaagcctgtggaggagaagaaatcgacggtgggagacaaggctccggcggagaagaagccaaaggccggaaagaagcttccgaaggagggaggcgccggcggagaaggtaagaagaagaagagaaacaagaagagcgtggagacatacaagatctacatcttcaaggttctg

SEQ ID NO: 12826 - DNA, 273 bp, Glycine max
  Clone ID: 701066275H1
tcctgatatgatatcacaacttgagagtgctggtctatcttttgttggcaaagatgaaactgggaagcgcatggagatagttgaatgtcccagtcatcctttcttcattggtgctcagtttcatcctgagttcaagtccagaccagggaaaccttctccattattcttaggattaatatcagcagcatgtgagaggacaattgtgcctgccagcaatggctatagcaagttaacaaatgggatacactcaccattgttgaaagcagcagcagc

SEQ ID NO: 12827 - DNA, 275 bp, Glycine max
  Clone ID: 701066276H1
agattcagaaaccctcacttgttgttggtgtggttgtgtttttgcatgcttcggacatgtcgatggcgatggtccacccttcggttcacccaatcgaagccccacccatgactgagcatgcaattgcaattgcaatgcccagacacactctgaaggatacgcagggcatgcccggcaccctcggtggcttcctcttgcgcttcgcccagttctctttcgccctcgtttccctctccgtcatggctatcacctccgatttcccttctgttactgcc

SEQ ID NO: 12828 - DNA, 274 bp, Glycine max
  Clone ID: 701066277H1
gcctgaaccatcttttgagattctgactaatcctgcaagggtggttcctgcacagtcgcagtgtattaaatttttgcaggatagcagatatgttccggttaagttggcaccatcaggatttgtgcttctcagagacttgcatcctactgagccagaagtgcttgctctaactgacacgccctcatctaccagttctgctgctggtgggtcagcaacaggattgcagagttcttcatcagccatggctgtggatgaggaacctcaacctcctcaa

SEQ ID NO: 12829 - DNA, 277 bp, Glycine max
  Clone ID: 701066278H1
tgaaaaacatggatatggggtggaggaatttaatgaaaccttatatgatgaatgggttaacaagggcgacgcaccggcattgccagagactcttaaaaattacaacaagctgttgtctcttggcttcaagattgtattcttgtcaggaagatatcttgacaaaatggccgtaacagaagcaaacctaaagaaggctggcttccacacatgggagcagttaattctcaaggatccacatcttatcactccaaatgcactttcatacaaatcagcaatg

SEQ ID NO: 12830 - DNA, 280 bp, Glycine max
  Clone ID: 701066279H1
tcttatcttagctaccccatcacaacaaccacgatactatttctcatactctattaggcaaaaacaccaccaaatgggagaggaaaaggagcagcctaagaatgacaccgagaaaaagcccgaggaggtagcccccaagaaagacgacggacccatccctgtcgtttacaaactcgacttgcattgcgagggatgcgtcaagaagatcaaacgcacctgtcgccacttcgaaggtgtggaaaccgttaaggcggatctatcgtcgaacaaggtgactgtt

SEQ ID NO: 12831 - DNA, 283 bp, Glycine max
  Clone ID: 701066280H1
gttagatcaagctatttattctcttaatcactgtctgggacctcttatcttcttcaatcactttcaaagatcatttgaattgaagaaatggggggccatatgagcaagaagacccctgaaacatcatctggtattaacatcaatgctgatatggcaactgaattgaggtcatatgaggctgcctgcaagctctgactctgatttgcagtcctttaataccaccattcaagctcgagcaaatcaagtcattaatactcttgctgttggagttgaggttcgatcc

SEQ ID NO: 12832 - DNA, 281 bp, Glycine max
  Clone ID: 701066281H1
atcaagcgcagacatgggaacttacaaaggaagaaacgcgaattgatgatggaggtcaccaaagacgaagctgcaacgccaggatcaggaggtgctcaacctcccaatccaatttctaacggtaaccctaatccaaatccaaaccctaacccgaacatgcctcacacccccagaggatccaaaggaaaatcgtgtaagggatgcacctactacacatcgcttcataaggccaagtccaaaaccccacatgcgttggtttctccagagcactccagcaagta

SEQ ID NO: 12833 - DNA, 281 bp, Glycine max
  Clone ID: 701066282H1
cgaagacaaacctctgttctcaactgtgtttctttacctctcacctactttcagaccataccaggctgagaagatgcagcagacaccgcctatgattcctatgatgccttcgttcccacctacgaacataaccaccgagcagattcaaaaataccttgatgagaacaagaagctgattctggcaatattggacaatcaaaatcttggaaaacttgcagaatgtgcccagtaccaagctcagcttcaaaagaatttgatgtatttagctgcaattgctgatg

SEQ ID NO: 12834 - DNA, 273 bp, Glycine max
  Clone ID: 701066283H1
tgcatctgggagtgggagagaaagatgccgaagaggacaacgcacacatactcaagcgaggatgcagctccggacggtcctcactccgatctctttgtatattactgcaaacattgcggatcccatgtcctcataacagatacccacttgcagaaaatggctaaaagggaaaccgacaaagcttatgtactggacaagagcaaacatctggccagattgaacatgaaggaaggcgggaaagtagtgttaaaacgaggggacgggaaaatggag

SEQ ID NO: 12835 - DNA, 280 bp, Glycine max
  Clone ID: 701066284H1
cactctgcttcccctggcaaccttcttcttagttctctccgcttcttatctccagattgctggggcgaaagcacaaccgttgactagtctcaagcttaactctccgatccttcaggagtctattgctaaagagatcaatgaaaatcctgaggcaggatgggaggctgctataaatcctcatttctccaattatacagttgaacaatttaagcgccctcttggagtcaaaccaacgcctaagacggaactgagaagtacacctgctatatctcacccaaag

SEQ ID NO: 12836 - DNA, 279 bp, Glycine max
  Clone ID: 701066286H1
tccatttcttacaccgtcaacacatcgcaattctgaaagggaatggaaggagatattaagcttttggatggagatgacactcacaaaaagaaagaaagttctctggtgaagataaaagtattgtttttcgccagagcccgtgatctcactggcctgagtgagttgccactggaggtgtcatctggaagtactactcatgattgtttgaaaaagctttttgtcaagtttccaagtttggaagaaataagaggctgcatggttttggctctgaatgaggag

SEQ ID NO: 12837 - DNA, 259 bp, Glycine max
  Clone ID: 701066288H1
ctctcctttaccatcattctagatatcgcagaactttgcagctctcttaggtttttaaaaaacaccacgcaaacagcaagatggccacttccgacagtaacatgctactaaattatgttccagtttatgtgatgctcccactcggagttgtcaatgttgacaatgtttttgaagacccagatggccttaaagaacagctcttgcagcttcgagctgcgggtgttgacggggttatggttgatgtgtggtgggggatcat

SEQ ID NO: 12838 - DNA, 270 bp, Glycine max
  Clone ID: 701066289H1
cgggtttggatcctgaggctaataggttgttcaatgagggcatggtgtgcactgctagggttgtgtccaaggctgtgatcactggctacaaagatgggttcaaccagattaagtccttggtgcatgttggaggtggcattcgagggtctctttcggagattgttagggcttatcctcatatcaatgccatcaactttgacttgcctcatgtggttgccactgctcctaagttcgatgggatcacccatgttggaggtgacatgttcgtgt

SEQ ID NO: 12839 - DNA, 250 bp, Glycine max
  Clone ID: 701066290H1
cgttctttgtctcgcaatcttcactattttcaccgagcatttgcattccacattgaatatggctcaggctacacaatctaatgctgagttattggagtggcctaagaaagataagcgccgcttcctgcatgttgtgtatcgtgttggtgatcttgatcgcaccattaagttttatactgaatgttttgggatgaagcttttgaggaaaagagatattccagaagagaaatatgccaatgcttttcttgga

SEQ ID NO: 12840 - DNA, 265 bp, Glycine max
  Clone ID: 701066291H1
gcagtttgaaggaaaaggtttcttcgcctccaagagttagaagcccacccatacaaggccttctctatgcatggaatgaccgtcttgataagcttcctgatgagcttgctaggacagctataggaaactttgttgctgtgatagagactatttaccatcagcaacaagaagaaatagctttgaagaggaaatgtgaggatacacgacaggagctatcccgtaaaaccagacaatttgaagattggtataacaagtatatgcaaaa

SEQ ID NO: 12841 - DNA, 275 bp, Glycine max
  Clone ID: 701066292H1
cttacacatctctccaacctttcactttcgtttctcagttttattcgaatccctctctcaatctcctttccaaatggccagcgttgaggttgcacagcaaacaccaacaacagttccagaaaatgaaacaaccgaggtaagcaagacccaggaaacaaccccagtcactgaggctcctgcaacagaacaaccagcagctgaggttcctgcaacagaacaaccagccgctgaggctcctgccccagaatcaaccaccgaagcaccaaaggaagaaa

SEQ ID NO: 12842 - DNA, 270 bp, Glycine max
  Clone ID: 701066293H1
cagaagcgaagaagaagccacagagaactagtctcctactctcacccgcaagaaaaaatggcatctcacatcgttggatacacccgtatgggtcccaagagagcgcccaagttcgctctcgagtctttctgggatggcaagagcagcgccgaggatttgcagaaggtctcttctgatctcagggcatccatctggtcgcagatggctgatgctgggatcaagtacatcctcagcaacactttctctcactatgaccaggttctcgacgcc

SEQ ID NO: 12843 - DNA, 277 bp, Glycine max
  Clone ID: 701066294H1
ctagactcttctttttctctaagctcaaccggtgccctgagatcactttgagcaatggtgaaggctgtggcagttcttggcagcagcgagggtgtcactggaactatttccttcactcaggagggaaatggtccaaccaccgtaactggatctcttgctggtcttaagcctggtctccatggcttccatgtccatgccttgggggacactaccaatggttgcctgtcaactggagcgcatttcaatcctaataacaacgagcacggtgcccctgagg

SEQ ID NO: 12844 - DNA, 270 bp, Glycine max
  Clone ID: 701066301H1
ctcgctctgtttctgtctctgtgtttgcggctgaggattccgaacgagcgaccttcttcgtttctcgcaaagtttaagtcatcatgggtaaggaaaagactcacatcaacattgtcgtcattggacatgtcgactctgggaagtcaactaccactggtcatttgatctacaagcttggaggtattgacaagcgtgtgattgagaggttcgagaaggaggctgctgagatgaacaagaggtcattcaagtatgcctgggtgcttgacaagc

SEQ ID NO: 12845 - DNA, 264 bp, Glycine max
  Clone ID: 701066302H1
cgagataactagaaacagtgtgatgaaaatgaaggtccttgtcttcttcgatgctacaattttcgtagcatggcaatgccatgcgtacgatatgttccctctccgaatgaacactggctatggtgcacgtactccggacgcgaaatgcgcaagttggaggcttgctgtggaagcacacaccatcttcggcttgcagaccattcctgaagactgcgttgcaagcaacaaaggaatacatccatggcgaacaatatcgatcagact

SEQ ID NO: 12846 - DNA, 232 bp, Glycine max
  Clone ID: 701066303H1
cagtgatcggtgttcacttgatccttcataagtcgtcatcatcatcatcatcatcaccgttgattgaagaagatgccgatcagaaacatcgccatcggaaggcctgaagaggctactcaccccgacacgttgaaggcggggttggctgagttcatctccacctggatcttcgtgtacgccggttcaggttccggcatcgcctacaataagctcaccgacaatggcgccgcca

SEQ ID NO: 12847 - DNA, 238 bp, Glycine max
  Clone ID: 701066304H1
cctctctaaacttgtacctgaatattcttactccctgtgatgaagagggtatttgcaaacatgcctttgagttgatttttagatttcatgaagtcatctctctatggcacaaggataatgtgactgtcgcccaagttaagcaatattgcgaaatggagactcatggagatacgctgcacaagttggttttccacagctagattactgcaactaaggacgttctgcagcgtcaagctag

SEQ ID NO: 12848 - DNA, 215 bp, Glycine max
  Clone ID: 701066305H1
gcaaactgataataaagaccttcatctgagctcgaaatacttttatcttaaaattctaagctatgtgtaaaattccatcactcacagacatgtcctctagctctatatctatctcagaggacatagatctgtgctcggtaccaaccgcagcttgaggcctttcacgctagttacgttggcggaagagtcttgcagcgcttagcattgacaccggt

SEQ ID NO: 12849 - DNA, 119 bp, Glycine max
  Clone ID: 701066307H1
cttctcgcagagtgagcgagtaagcgaatatcgcaatcgcacaccgctggtatgcccaggcagcgctgattgcctattctgcgcacatccaagaaacatgttctgtcactaaccctgtc

SEQ ID NO: 12850 - DNA, 116 bp, Glycine max
  Clone ID: 701066308H1
cttaacctcactcaaactcgggatcacagataccaacaacagttcttgcaatgaggtttcacgatgttgccggaacatgcactgggtgtgcgtgtgttagctctgtctctggactt

SEQ ID NO: 12851 - DNA, 257 bp, Glycine max
  Clone ID: 701066309H1
accaatccatagccgaagaagagaaaaaagagacaaggaccgtcttgagttaatttgattcagtgtagcagccagcagccataagcaacgcaacaattccatttccagtttctgattcgtcacgtcagacaaaggaaggggttagggtgtgacctgagatcaaaatgttgcggaggcttctctcctctcacctccaaaccctaagcttctccggcggcggcggcggcaacggcaatccccgatttggttccggcttc

SEQ ID NO: 12852 - DNA, 273 bp, Glycine max
  Clone ID: 701066310H1
cactctcaactctgcttcttttcaatcagttacattttctttggtattccaatggccactgttgaggttgtgtcagcaaaggtttccctcccagaggacacaaaagatgcatcattgaaggctgatgataagaagaacacagaataagttgttgagacttcaacaccaacaccagaaaatgtcgtcactgagcaaacaaaggaggaaagtactgaaggcccacaacctggtagttcagaagaaaagccctcggttgaagttgtgtctggaact

SEQ ID NO: 12853 - DNA, 272 bp, Glycine max
  Clone ID: 701066311H1
cctcgagccgaatcggctcgagcggctcgaggcaggggctccaattactactcttagccgcagatctctcagggcttgcatctacctcaggtaagttgtgaagatgtacacatcaaggaagaaaatccacaaggataaggatgctgaaccaactgagtttgaagagtcagttggacaggcattgtttgatctggaaaataccaaccaggagcttaaaagtgatctgaaggatttatacataaactcagctgtgcaagttgatgtttctggga

SEQ ID NO: 12854 - DNA, 219 bp, Glycine max
  Clone ID: 701066313H1
ttcggctcgagctcattaattgctagactggcacttcgttgcttggtgatgtctctttctgttgtcttcactcttggtcttgcgagagaaagccatgccagagaagaagatttttcgcatgctgtatggctaaatactctcattccatgttcattgcgagaccttctatagcctggctctgtcagtgatgacatcgatgttcaccctatgctacttgct

SEQ ID NO: 12855 - DNA, 273 bp, Glycine max
  Clone ID: 701066314H1
tggcaagaagaagtttgagactctttcctacctgccagaccttgatgatgcacaattggcaaaggaagtagaataccttcttaggaagggatggattccttgcttggaattcgagttggagcacggtttcgtgtaccgtgagcacaacaggtcaccaggatactacgatggacgctactggaccatgtggaagctgcctatgtttggttgcactgatgcttcccaggtgttgaaggagcttcaagaggctaagactgcataccccaacggctt

SEQ ID NO: 12856 - DNA, 114 bp, Glycine max
  Clone ID: 701066315H1
cggcgctgtaccatagcactcatggacacattctccgtcgtcacgttgacaatggcgctcaagaaacgtgagacacgtggagttgtatcagcgtagaggacggctcaggagatg

SEQ ID NO: 12857 - DNA, 272 bp, Glycine max
  Clone ID: 701066316H1
agcgacattaagatggtgaaagaagttgggttggattcatacagattttccatctcatggtccagattattccccaagggcaagggagcagttaacaccttgggggtcaagttctacaacgatctcattaatgagattatagcaaatggcttaaagccatttgtcacgctgtttcattgggacctcccacaagctcttgaagatgaatatgggggatttctcaaacctgaaatagtggaggacttccgtaactatgctgacttttgcttcaa

SEQ ID NO: 12858 - DNA, 280 bp, Glycine max
  Clone ID: 701066317H1
ttcggctcgagtcgagataactagaaacagtgtgatgaaaatgaaggtccttgttttcttcgttgctacaattttggtagcatggcaatgccatgcgtacgatatgttccctctccgaatgaacactggctatggtgcccgtactccggaggtgaaatgcgcaagttggaggcttgctgtggaagcacacaacatctttggctttgagaccattcctgaagagtgcgttgaagcaacaaaggaatacatccatggcgaacaatatagatcagactccaaa

SEQ ID NO: 12859 - DNA, 250 bp, Glycine max
  Clone ID: 701066318H1
ctgataagcaatcctgtgaactccactgttcctattgctgctgaagttttcaagaaggcaggaacgtatgatgagaagagattgtctggtgttaccacccttgatgttgttagggcaaaaactttctatgctgggaaagccaatgttccagttgctggtgttaatgtacctgttgtgggtggccatgcaggcattactatccggacattattttctctcgccacacaaagagccaatcttgatgatgacg

SEQ ID NO: 12860 - DNA, 267 bp, Glycine max
  Clone ID: 701066319H1
gcataagcatcttctcagagcttcttagttctcacccttcattcttttcttcagcaaatcagagacaaacacagaaatttaaggaatggcaggtgcaagagccagtggcatgatgaatggtggaagaagcttcccaaggaggttctctgggcgtccaattccaaagcgtggacaagtcaaagttggaatagttgtcgggcttgcaaactctgttgtttccattttctctcgcagcagagccacccgaggatgtgctacacctactca

SEQ ID NO: 12861 - DNA, 158 bp, Glycine max
  Clone ID: 701066321H1
aaaaccctagctcgcgttctgctttcgtcttttacatcaggatggagtctcaggtgaagcacgcacttgttgtcaaagttatgggtcgtactggatccagaggacaagtaacccaggttagagtgaaatttttggatgatcagaaccgtcacatcatg

SEQ ID NO: 12862 - DNA, 247 bp, Glycine max
  Clone ID: 701066322H1
gttctttctctcgcaatcttcactacattcaccgagcatttgcattcacattgaatatggctgagactacacaatctaatgctgagttgttggagtggcctaagacagataagcgccgcttcctgcatgttgtgtatcgtgttttatactgaatgttttgggatgaagcttttgaggagaagagttattccagaggagaaatatgccaatgcttttcttggattgggcctgaaacaatcccatttgg

SEQ ID NO: 12863 - DNA, 253 bp, Glycine max
  Clone ID: 701066323H1
cctccctctcctcttcctcaacatcttcattcaaacaatttcagcccaagtagcaccagcaccagcgggccccaccaacatcacccaagttcttgagaaagcaggccaattcacaaccttcatcaaacttctcaaggcctcacaaatagctgatagaatcaattcgcagctcaacaactcaaacccaggcctaaccggatttgcacccactgataatgcattctcaagcctcaaagcagggacactaaactcc

SEQ ID NO: 12864 - DNA, 231 bp, Glycine max
  Clone ID: 701066324H1
ttcttttcctctttgctcttgtctcgttcacttcccatgcttctgtcaatgatttctgtgtagcagacctaaaaggtccagatagcccttcaggctatcagtgcaagccacctaacacagtcacagtggatgactttgtgttctctggctttgtagctggaaacacaacaaaaatttcactgctgcattaacttcgcaattgtaatggttttcccagtgtgaaaggtcttg

SEQ ID NO: 12865 - DNA, 159 bp, Glycine max
  Clone ID: 701066325H1
gttaagcttttgatccagaaccaggatgagatgatcaaaactggtaggctttctgagccctacaaaggtattggtgattgtttcaagagaacaatggcagatgagggtgctatttctctatggagaggaaacactgctaatgttatccgttattcccca

SEQ ID NO: 12866 - DNA, 265 bp, Glycine max
  Clone ID: 701066326H1
aaagagctgcagattgagatggattaattatctgaggccagacctcaagagacgtggatttactgaaatggaagaggatcaaattatacagctacattcatgtctaggtaacaggtggtctaagattgcttcacattttcctgggaagacagacaatgaaatcaagaaccattggaacactaaaatcaagaagaggttgaagctcctaggtttggaccctttaaccctgaagccatctgagcaaaaggaaaagtctgttgatgac

SEQ ID NO: 12867 - DNA, 271 bp, Glycine max
  Clone ID: 701066327H1
tcgaggagtaccggaggatgaggaaatcgaagatgttgcagaagactagatagtgataaaagctgctaatggctatgacataaaatgaactcgaattttctacatttaagttaagatacaaaaacagtaggtttttttgtagttgtgtagagatttgaaatgatgcactcgcttgtgtatagggtgcctatgttcaagttgtctgttattttattttcatgcttctgaatatgttatttctctgtttatgtaataatcaatatcatttgaa

SEQ ID NO: 12868 - DNA, 273 bp, Glycine max
  Clone ID: 701066328H1
ccaaattccaattcccaattcccaattcgaaacccttattcctttcaaagaaccaaattgagtgatcgtgatggcaccaaaggcagagaagaagccagcggagaagaagcccgcggaggagaagaagtcgacggtgggagacaaggctccggcggagaagaagccaaaggccggaaagaagcttccgaaggagggaggcgccggcggagaagggaagaagaagacgaccccaagaagagcgtggagacatacaagatctacatcttcaaggtt

SEQ ID NO: 12869 - DNA, 269 bp, Glycine max
  Clone ID: 701066330H1
agaatattgagaaggccttggttgaagccttccaacccttgggaatctccgattacaattctatcttctggattgcacaccctggtggacccgcaattttggaccaagttgaggctaagttaggcctgaagcctgaaaaaatggaagctactagacatgtgctcagcgagtatggtaacatgtcaagtgcatgcgtgctattcatcttggatcaaatgaggacagaatcaatagaaaatggacttggcacaaccggtgaaggtcttgac

SEQ ID NO: 12870 - DNA, 269 bp, Glycine max
  Clone ID: 701066331H1
caataatatcatttccgttctcaaaatcataacagtacttcgcgtgccctagctcactccgtcgctcctcacccttccggcagtgcttggtcgtggccgtcacggttcaaacttcaaaagcatttgttgtgttggagtaggctatggatgacttgtttgattcttcgctgaacttggaggacacccattacaaggaaggctatgacgaaggctacagccatggccttgtcactggcaaggaagaagctaggcaggttggcctcaaggtt

SEQ ID NO: 12871 - DNA, 272 bp, Glycine max
  Clone ID: 701066332H1
cgcacagtttgttttcattgggtgctgatcggaacaaacagggaatagaagagaggtgaagatgggtttcataatggaatttgcggagaacttggtattaaagttgatggaagatccgaaggaaagggatcggaggttcagggagcacgtttatagagtgaaggacaggtgcgagaagacgaaggagatgtggagctaccctatgcgaccctatgggttttggacattcgaacgccacaattctcagcttgcttgggatgcacagattagcc

SEQ ID NO: 12872 - DNA, 141 bp, Glycine max
  Clone ID: 701066339H1
caaattagttcattctctttgcgcagttccctacctctcctttcaagatgcagcttctcgtcaagatcctcaccggaaagaccatcacccttgaggtagaaagctcttacaccatcgacaacgtcaatgctaagatctcag

SEQ ID NO: 12873 - DNA, 159 bp, Glycine max
  Clone ID: 701066340H1
ggttacgccgtcgtcgctgtttgtgtgtgtatcaggtgcagctaccaacgatggtgaagggtcgtcaaggagagcgcgtcagactctacgtgaggggtacaatccttggatacaaaaggtccaagtccaaccagtagcccaaacaatccctgatccaaa

SEQ ID NO: 12874 - DNA, 183 bp, Glycine max
  Clone ID: 701066341H1
tggctggtaaaatcgtggttgaattgaacggtagactgaacaagtgtggggttattagtcatcgtattgatgtcggcgtcaaagatcttgcaggctggactgctaggcgtctcacctcaagatagtctggagatagtgtattgactagctctgctcggcatcatggatcactgagagctacga

SEQ ID NO: 12875 - DNA, 220 bp, Glycine max
  Clone ID: 701066343H1
ctacttctaaatgggaatgcagcaatgacagttaaataagaaaggggaaatgattttcacttgcaatatcttttcttgtgcatagccatagagctcttatctactggattgccttgtctcttgcagtggtctttgaaccggaaatagttgggctgccatcatgcatcaacgcgaggtagaagaccttggttacgccggatgatgtgggttatatgaagcg

SEQ ID NO: 12876 - DNA, 262 bp, Glycine max
  Clone ID: 701066344H1
aagagagtgagtgagtagggtttcaaattccaatcggaagaaatcggaatcggaagacatggtctgtggcggcggcgatcacggccatggacacggacacggtgatttcaggaacaaggtctggagtatgagcggtggcccttactgtcgcccaaagcactggtagcgcgacaccgccattgtcatgttcggcgttgtcctcatctgcatccccatcgctatgaaatccgctgaactcgaggaacgaccacatcaccctgtt

SEQ ID NO: 12877 - DNA, 125 bp, Glycine max
  Clone ID: 701066346H1
attccttagaacatttgcaccagctcatgttgagaatggacgatggactcaaggtgggcagtgagtcagaagtcagccgatgaagggacatgagacaagattagcgggcactaatttggagctat

SEQ ID NO: 12878 - DNA, 268 bp, Glycine max
  Clone ID: 701066348H1
tggaagctgtggagaagggtcatggtgacttaaaagaaaagccttggtggcctacaatgcagacaactgaagatctcattcaatcatgctctattatcgtttggacagcttcggctctccatgctgctgttaattttggacaatatccttatgggggcttaatcctgaaccgtccaactctagccagaaggtttatcccagctgaaggaaccccagagtatgatgagatggtgaagaatcctcaccaggcttatctgagaacaatcac

SEQ ID NO: 12879 - DNA, 269 bp, Glycine max
  unsure at all n locations
  Clone ID: 701066349H1
gtggcaaaccccccaaaaagcacaagcctggtaaaacaccaaagacacccaaaacacccgttgttaagccaccagtcaccatccctcncattaatgttcctcccgttgttcttccaccaatagtgaagcccccaggtattctccctccaattccaattattaacccaccaaccacaccagggaagggagggaacactccatgcccaccaccaaagtctcctgcgcaggctacgtgccccattgacacgctcaaacttggtgcctgtgtg

SEQ ID NO: 12880 - DNA, 267 bp, Glycine max
  unsure at all n locations
  Clone ID: 701066350H1
cagggatgaatattgtttttcatgtttcctctcaaacttttgggaaagatacaaagacaaatatctatgtaaggtttactatatttgtttttttacaatgtgtttctctcccaaatgcaaaagggaaacgagaggatcgattcttaactccctctgcgggaacgactcttgtgtgatgaatccctggtgtcgctaggtccattcaacatagatatcaagnntccctatagaaaaaaattgtatatcattgattaatgcaactatttt

SEQ ID NO: 12881 - DNA, 175 bp, Glycine max
  Clone ID: 701066351H1
caccaattcatatctgggcttatacatttgtattggtgattgctcacactaggaaatctgtagtctcttcttgcagcgattctctcgaggaatggttgcatctggctttggatacgatggatatggtggttgtcaaagtcgatttatcatggatgctctaaaatgctagtttatg

SEQ ID NO: 12882 - DNA, 129 bp, Glycine max
  Clone ID: 701066353H1
tctgatcgagcgattattcatgtgattaagacctatctaggcatcatgcttttataggtattcaaatcatgctgcaatggggatgatgtaagctaccacataatcaagatatagaaatcacttatataa

SEQ ID NO: 12883 - DNA, 265 bp, Glycine max
  Clone ID: 701066354H1
ggtgtatcaaggagctttggagttggccctcagttgatatgggacaaggctcttggaatgccactcgaaaggccgaaaagtgtaacactggagaagctcgagcaattagtcgccaaatcatcctgaaatttaaggcaccatttctgttaataatttctagaatacacactgcggtagatgtgtggtggtgttgagttgaaaatttggtaccattgtactgaggaatatccactaccctcccccatggtgtctatgtcagaagatt

SEQ ID NO: 12884 - DNA, 166 bp, Glycine max
  Clone ID: 701066355H1
ccgattgctagaatggaatttcgatgctcagtcatctctcttaccatactctgctctcttgctcttgcaggagagagccatgtccatggatcgctagctgaggacagattactcggaagctatttggcacgacactcacatgcaccatggactgcgagatcctcta

SEQ ID NO: 12885 - DNA, 245 bp, Glycine max
  Clone ID: 701066356H1
cggctcgagagagtggtttgatgaagccgttaataaaaccgcgggcggggaaaacaaacgttaacgagaggcgtgttgtaatttgagggaaggtggaagggcaaatgaggaaacaagaaaagtggtgcataagacaaatcaaagaagtagtagtagtagtagaagaagaaaaaaaaaaaaaccgcctcaaagaagggaaagtttaaagaattgcggaatacccgatgttttttttgaaaaaataa

SEQ ID NO: 12886 - DNA, 150 bp, Glycine max
  Clone ID: 701066357H1
cccaagtgaaagacagaagacaagtcaaagacaatgtcagggatcattcacaagattgacgagacccttcatgtgggacgccacaagaaggaggaggagcacaaaggtgagcagcacatggtggagaataaaaaggggagcatcatggtg

SEQ ID NO: 12887 - DNA, 270 bp, Glycine max
  Clone ID: 701066358H1
cgaagaagaagaagaacaataatgaaggacgccggaaagagccacaaggcgaatgcaaagctgtcgccggagacgcggaaggatcggaaatcggcgacggggctgagtggatcgccgaagaagggaggccacggcgggaagttcacgtggatcggcaacggctacgagaacgtcgagatggagcacggtgctatggacgccaaggacccgtacttcgatgatccagcggagatcgccgccgtgtgatcgcggtggtttccggtgacgaaa

SEQ ID NO: 12888 - DNA, 264 bp, Glycine max
  Clone ID: 701066359H1
gctgtgtctggggaaatttgccttgtttttcgcggtacagctcacacacactgaacggttagtatgtcggacaaggctgttacaatccgaacccgaaagtttatgaccaacaggcttctttccaggaagcagtttgtcgttgatgttctacatccaaggagggcttatgtttccaatgctgaacttaaggacgagctagctatgatgtataatgtcagaggccctaatactgtattagctctcgaattcctgatacattttgga

SEQ ID NO: 12889 - DNA, 261 bp, Glycine max
  Clone ID: 701066361H1
ctcttcttctcttgcggtctggtttagcgagttcttatagatttaaggaagatgggtactgataaggttcacatcagtattgtggtcattgtgtatatcgactctggtatatcgactattaatggacacatgatttacaagcttgtaagaattgacaagcgtgatattgacatgttagatatggaagttgctgtgatgaataggaggtatttaaagtatgcatgagtgctggataaactttaggttgaacgttaaagaggt

SEQ ID NO: 12890 - DNA, 265 bp, Glycine max
  Clone ID: 701066362H1
cttgcttcttgcttctattacttgcttctaccttcaccatgtcactcgctgggaaaatcaccactgaaattggggttcatgcaaccgctgcaaagtggttcaacctctattcaacacaacttcatcatgttcaaaaccttactgatagagtacatggaaccaagctgcatcaaggtgaagactggcatcacaacgagacagtcaaacactggacttataccatagatggtaaggctacaacatgtctggagagtattgcatccat

SEQ ID NO: 12891 - DNA, 265 bp, Glycine max
  Clone ID: 701066363H1
agcatcccaagttttagaatcaatcaaacaaacctcagtaccaagaaccctatgccttgacaaaccctaacgttgatttaaatcgtttgttcgcacttcaatctccaagtcataaatacactcttctctccccattcactcgcattggcttttggtagttgaagtctttcattgttgtcaaattcagatcaggactactcaggcaagtgatagcagctctgggcttcgagggctagaatcctccgaagaattcaagagaagaggg

SEQ ID NO: 12892 - DNA, 261 bp, Glycine max
  Clone ID: 701066364H1
attagaagacaatggcgggtggtggaaaggtttcgttcaaagtcacactcacctccgatccaaagttacccttcaaagtgtttagcgttccagacgcggcaccttttactgccgttctcaaattcgccgccgaagaattcaaagtcccgccccagaccagcgctatcatcaccaacgatggtgttggcataaatccccagcagagcgcaggcaatgtcttccttaagcatggttcagaactgcgcctgattccgcgtgata

SEQ ID NO: 12893 - DNA, 265 bp, Glycine max
  Clone ID: 701066365H1
tggaggagcaccaaagggtcctcaactgagagacattgatcgtggagcagatattgtggtagccactcctggtcgcttgaatgatattcttgagatgagaagaattagtcttaatcaggtttcttacctggtgctagatgaggcagacaggatgctggatatgggttttgaacctcaaattaggaaaattgtgaatgaggtgcccaatcgcaggcaaactctaatgtttactgcaacatggccaaaggaggttaggaaaattgca

SEQ ID NO: 12894 - DNA, 253 bp, Glycine max
  Clone ID: 701066366H1
caaactttgtaacttcaaaacatactcctctgttctctctgtttctcttcaatcttcctgaaaaaaacaagaacacgagaaatcatgcaccctctcacattctctctctctctcctttcaactaatatggcaatcgaaaaccaagacaacactgtcagagaaatcaagccaaagaacaggagaatcatggtgtcctgaaggccctgatgatgacgacactaggtggccacgtgtgttgaagccatggtgaaag

SEQ ID NO: 12895 - DNA, 263 bp, Glycine max
  unsure at all n locations
  Clone ID: 701066368H1
cgcgtcgcttcgcaccagtttcaatgtacgaatatgtttgctgntatggagcgatccgtgaaaaactctgcaaacaggttggtttatcaggacctcgttacaggtgatgacgttctctcggactccttgcgttacaaggaaattctgnatggaatgctgtgggaagttgaggggaagtgggtttgtaaaggagcagttgatgtagacattggtgtcaacacttctgctgagggtggaggagaagatgagggagttgatgatgc

SEQ ID NO: 12896 - DNA, 184 bp, Glycine max
  Clone ID: 701066369H1
gtttgttaccttcatgaagaggtttatcaagaatttgactcccaagctcgatgcagagaaacaagagttgtttaagaagcacattgagggagcaactaaatacctgctctctaagattaaggatttccagttttttgttggggagagcatgaatgatgatgcttgcttggtctttgcataatac

SEQ ID NO: 12897 - DNA, 265 bp, Glycine max
  Clone ID: 701066370H1
tcgtttgctcaccccaactcttcttccagtctccatctccatctccatcaaatttaactatggctactgaagaggtgttggttgatgaaatcacttacccttccaagatccactactaccaagccgctatctttgcttggccatggaatcaccgacatggagatccactttatccatgtgaaattctattcaatcgggatttatttggagcctgaagtagttggccacttggagcagttcaaaggaatatctgcaaaggagctgg

SEQ ID NO: 12898 - DNA, 238 bp, Glycine max
  Clone ID: 701066371H1
attcaacactcatatccttatcctgtttctttcaatggaagtcatttctgcttctagcttgaatcccaacgctccgatgttcgtggcactcgcctatcggacggtggaggatttctccgaccagtggtgggacctcgttcactcctccccctggttccgcgactactggctccgcgagtgcttccaagatgcccagttccaaaacgacgacgctttcgacttcgactttgacctagat

SEQ ID NO: 12899 - DNA, 177 bp, Glycine max
  Clone ID: 701066372H1
caaagccatggccacctccaacttctctattgttctctccgtctccctagccttctttttggtgctacttaccaaggcacactcgaccgataccgtttctttcaccttcaacaagttcaacccagtccaaccaaacattatgctaccaaaagatgctagtaattcatctctggggtg

SEQ ID NO: 12900 - DNA, 242 bp, Glycine max
  Clone ID: 701066373H1
cagacagcagcagcaacaagaaacaaactctttctggattcagtttttgatgtgaaaatggcagtgactcttacatcaacactctttctggctttgctatttgctgcttcagcttttgctgctcttcagcctagagtacctgaagcttacctccaaaatgggaactttgaggagcaaccaaaccctaaatcccttggagaaacaaagctctttgggaaatacgctttgcctaaatggggggt

SEQ ID NO: 12901 - DNA, 263 bp, Glycine max
  Clone ID: 701066374H1
gttcaaacacatggctcagcaaagaatttgcctacatcctgcacttcaagactcagaccagggctgtgctttttccctcaaaatgtcgtgtcccaaatcagtaccccaatcttctttgtaaatgcagcctatgactcattccagatcaaaaacattttggcaccaggtggtgctgatccccgtgggcaatggcgtgaatgcaagcttgatatcaaaaactgctcacctaatcaactcagtgtagtggaaggcatcaggacaga

SEQ ID NO: 12902 - DNA, 268 bp, Glycine max
  Clone ID: 701066375H1
ccttgccgagttaagagcaaggccaagcctaattggatgagtaggagccagttcggcattcgcaatgtcctgtgcggctttgtatgcagagagagtgctctcggcagcctccttacgctcggcgccggtcttgaactcggcaaggtatctgtggtaatctcccttcatcttgaggtagaagaccttggaatcgccggaggaagcggatgcaatgaggcgagagtcgaggagcttgaggataccgtcgcagatgttggagagctcggac

SEQ ID NO: 12903 - DNA, 263 bp, Glycine max
  Clone ID: 701066376H1
ggcactttcttgttttctctctcaccctcatatccatcatcttccacacccatgtgagcgctcctctgaggaatcaataatcaagttacccacagaccaaccaagggtcgagaaactgacccacttgcattttttctaccacgacatcttagagggcaagaacatcacggtggtgaaaatcatcgagccatcagcgagcgacgttcgtgaagcaactgggtttggaaccactttcatgatggacaatgttttgaccgagggtc

SEQ ID NO: 12904 - DNA, 267 bp, Glycine max
  Clone ID: 701066377H1
ctttccacttgtctccgaattagttatcttgagaaacattattcccattgctatatattatggctagcatgaaggttacatgggtggttgtgatcatgtgcatggccgtggtgggtgcaccgatgatggcgcaagcatgacatgcaatgatgtgacggtgaacatggcacagtgcctatcctacctgatgcagggaggaacaccttcaacactttgctgcagcggagtcaagaacattcttggctctgctgtcaccaccgttgacaa

SEQ ID NO: 12905 - DNA, 256 bp, Glycine max
  Clone ID: 701066378H1
tctgaaaccaaacaaagccgtcatcgtccttcagggacgctacgccggcaaaaaagccgtgatagtgcgaaccttcgatgaaggcacgcgcgagcggccctacgggcactgcttggtggcagggataaagaagtaccctgcgaaggtgatcaagaaggattcggccaagaagacggccaagaagtcgcgtgtgaaggcgttcgtgaaactcgtgaactgccagcacctcatgcccacgcgctacacgctcgatgtc

SEQ ID NO: 12906 - DNA, 195 bp, Glycine max
  Clone ID: 701066379H1
cagaggcattggatttcattttgcttaagtttaccaagttatgtaccgaatcatatgattctttctttgagtttgtccttgtctgtgtcttcggacggcacactacatttatagagtatttttaaaagatttatattcaagaccaactagaatgattcttcgctcgacttggaggacacccattggcaggccggc

SEQ ID NO: 12907 - DNA, 265 bp, Glycine max
  Clone ID: 701066381H1
tcctttttttacctcttcacattctccatttcacagggttctgatcatgttggggaagagggcccggccaatgatcggaaagttgtcggagttgttggtctcgagaggccgcacggtggcatatttggacaccaccggaagccctagaggcccattagacatgaagatgatgcaatcatcatcaagaggcttaaaaaactatgatcttggtggtgttggtcttggaattgtagtggctcttgataaatccaacgaggttgctgca

SEQ ID NO: 12908 - DNA, 263 bp, Glycine max
  Clone ID: 701066382H1
cttggaccaacttaaggcttctcaaagtggatatgctgttgattatgctacacaaggagcacaaggtggattcccagggaattttcttaaccagaattctcaagctggatattctcgctttggttctggaaacgactttatgtcacaggactacatgggccatggatcacaaggccttttcactcaggtggggttcagtgatcccttgcaactcgatgcaacacagagccatttcagtgtggcaaatgccaaccctcttcagt

SEQ ID NO: 12909 - DNA, 260 bp, Glycine max
  Clone ID: 701066383H1
agaagtttgagttttaaagagcacagaaaggcccactatgatgaattcctgaaagtcaaagagctgcaacaaaaggcttctctggaggatggaagtgacgaggatgataatgctgagcttaccatcgaggagaagaaaaatgactcatcttctccaataagtgctacgtgaaggagaaaaagtgtcttccaatcaatgcctacaaccagatgcttcctacatgatcaaataacacccactctagtttcatcagcctttgt

SEQ ID NO: 12910 - DNA, 262 bp, Glycine max
  Clone ID: 701066384H1
aaattttcttccttcgttggcatctgtgatctcttctcctcacaatgagcagatcagggtcaccaccggatttgaagaagtacatggacaagaagcttcagatcaagctgaatgcaaatcgcatggttgttggtactctccgtggcttcgaccagtttatgaatttagttgttgacaacactgtggaagtgaatggcaatgagaaaaatgacatagggatggtggtaatcagaggaaatagtgtggtcactgttgaggcgct

SEQ ID NO: 12911 - DNA, 135 bp, Glycine max
  Clone ID: 701066385H1
tgattattcatgtgattaagacatacataggcatcacgcttttataggctattcaaaattttgcctgcatttggggatgatgtaagctaccaaataatcaagacatagaaatcacttatataagttatgtaatat

SEQ ID NO: 12912 - DNA, 242 bp, Glycine max
  Clone ID: 701066386H1
ggaatgctagagattctcatgtgccggttttggctccacttccaattggctttgctgtgttcatggttcacttggcaaccatcccagtaacaggcactggcattaaccctgctaggagtctaggagctgctgtcatgtacaaccaacagaaggcctgggatgaccattggatcttttgggttggagcatttattggagcagccattgcagccttctaccaccaattcatcttgataccaggt

SEQ ID NO: 12913 - DNA, 158 bp, Glycine max
  Clone ID: 701066387H1
cagtcacatacatagaaacccattattcccaatttcccaatttccattaggcagagcaaagtaatcgcaaaatctagggtttgttcgttcgctcgttcgcaacaatggcgctgaggagattctacaacgagattcaggggaagagggtgagcgaggtc

SEQ ID NO: 12914 - DNA, 261 bp, Glycine max
  Clone ID: 701066388H1
gagagagagagacaaaaaagagaaagtgaaaattagaaactcttgtacttggttttatgccaaattagggactcttttagttgtcaattagatcacaaagatatggaggttgccatggaactggaagatgatctaattttttgctgatttgaggcaagacattgctctactaattatggatggaagatgaagatccactgctttcttgtcctcctgaatctcttcaggctttttcctggggcaattctcccctccacagtt

SEQ ID NO: 12915 - DNA, 219 bp, Glycine max
  Clone ID: 701066389H1
catcgatcaattaatttccaatggccgatcagctcaccgacgaacagatctctgagttcaaggaagcctttagcctcttcgacaaggacggcgatggttgtattaccaccaaggaacttgggactgtgatgcggtcgcttgggcagaacccaactgaagctgaactgcaggacatgataaatgaggttgatgctgattggaatggtaccattgatttcc

SEQ ID NO: 12916 - DNA, 259 bp, Glycine max
  Clone ID: 701066390H1
gccaagtgaaagtgagataaaataagaatcaaagagcataatgtcagggatcattcacaagatctggggagacccttcatgtgggagggcacaagaaggaggaggagcataagggtgagcaccatgctggagaatacaaaggggagcaccatggtgaacacagtagtgagtacaaaggagagcatcatggtgaacacaaagctagagaataccatggtgagcacaagccagaccacacagaggggttcctagacaaagt

SEQ ID NO: 12917 - DNA, 262 bp, Glycine max
  Clone ID: 701066391H1
gcagagacctagcttgttacagtcctcttcaacacaaagctggctgagtccacaaggtagctcatctggtattattgttaaaaagacggtcagagtagatattcctgtggacgcatatcctaattttaactttgttggtcgcctcctaggccctagaggaaattctctaaagcgtgtagaagcaagtaccgagtgtcgtgtcttgatcaggggccgaggtagcattaaggatccagctagggaggaaatgatgagagggaaa

SEQ ID NO: 12918 - DNA, 198 bp, Glycine max
  Clone ID: 701066392H1
agtgaactcagcactgaggagaaggagctcgccggaatctcgccggggctcgtgaggatgtcgattgggtagattggaaccttggagcagaaatggagccagttccaaaaggcgctcactagactaaacgactctggatacaagaacgctcgttggacttggttgctcatcatgcacatggacatgcaccctcgtctt

SEQ ID NO: 12919 - DNA, 269 bp, Glycine max
  Clone ID: 701066393H1
cagccactccgcacctcgcagcctctgtgccctcaacaaccatggctgaaatcgaaactaccgttccagatcccacccaaatcgacgtcaaactcttcaatcgctggagcttcgaggatgttgaggttaatgatatgtctctggctgattacattggagtgtccccatcaaagcatgctacatatgttcctcacactgctggtaggtactcagtgaagacgttcaggaaagcgcagtgccccattgttgagaggctcaccaactctctg

SEQ ID NO: 12920 - DNA, 264 bp, Glycine max
  Clone ID: 701066394H1
gtttttcaagagaacagctctagagacatcagactaccttaaagatgattgtctgtctgtgaattgtagtgttggtgttgtgaggtcacacacggaaggtccgaaaatctataccatagcaatacctccttctagcattggtcagaaatttggacaactgctggaaagtggtaaaggcagtgatgtaaattttgaagttaatggtgatatttttgctgcacataaattggtactagcagctcgttcacctgttttcagagcaca

SEQ ID NO: 12921 - DNA, 268 bp, Glycine max
  Clone ID: 701066395H1
caattttgcagattgttggaacatctaagaacttccagaagaggaagaagcagtcaatggcaatgtcatcagattctgaggactcgtacagcagcaacagcgtccatggtcttaagaaaaactgcaaagtccagagcttcacaccatccacaccacccccaacttcggttaattacagaacggccaagagaagaaagggaataccacaccgtgccccaatggtgggactaatcatagactattagtgatagtgggtatttttaggcta

SEQ ID NO: 12922 - DNA, 267 bp, Glycine max
  Clone ID: 701066396H1
cctcgagccgaatcggctcgagtgaaaatgttgcatatcctttgatttctagccatttcaaattctttggcaaaacatatctgacgttttgttttttccattattattgtgttgtaggaaattgtagtatactgctctctacaaaggttatccattgatgcaaggactattgtgctgccgcaaactatacacttctaataatttgatgttttacttttttgccaaatattgtgctgcagcaaactatacacatactatgttgttgcc

SEQ ID NO: 12923 - DNA, 236 bp, Glycine max
  Clone ID: 701066401H1
tggagctgaatttgtgcccagcgctgaggatggatacactgtcatagtacacaagagcaggaaaattgctcccgctgatgagaccgttcttaccaacggtttcaaaattggtgaacctggcaagattgtactcaccatagacaaccaaacatccaagaagaagaaactcctctacaggtccaagaccaaacccattgcagagtaacttgaataaggatgttactgttactgtgata

SEQ ID NO: 12924 - DNA, 267 bp, Glycine max
  Clone ID: 701066404H1
catatctccatttccatttcctctctctcagtttccaagaatcttaagctatgggaaagtcttacccaaccgtgagcgctgattaccagaaggccgttgagaaggcgaagaagaagctcagaggcttcatcgctgagaagagatgcgctcctctaatgctccgtttggcatggcactctggtggaaattacgacgtgagctctaagaccggtgcgtccttcggaaccataaagcaccctccgaactcgctcacggcgcttaaaacgg

SEQ ID NO: 12925 - DNA, 133 bp, Glycine max
  Clone ID: 701066405H1
tgtttgttgttgtaactcgttcttcttcttttgttgttctgtgtttgtgtctgttttttctctcacctgaaaatgtcttgctgcaggtggtaacatgtcggttgcggaagctccctggcacagtgccggcaac

SEQ ID NO: 12926 - DNA, 91 bp, Glycine max
  Clone ID: 701066406H1
cgtttatgtactccctccgtctcataatatttgttgtgtaaaaagcaaaacataaatctagttgttattttgaaaaagaggaacaacaagc

SEQ ID NO: 12927 - DNA, 268 bp, Glycine max
  Clone ID: 701066407H1
gaacgctgctgccgaaacccttccggaaccctaaggtaagtgagtaatcagtggttgagaatggtggacaaggcgaagggtagaaaggaggaggtggttacacgtgagtacaccattaacctccacaagcgcctccatggctgcacatttaagaagaaagctcctaaagctattaaggagataaggaaatttgcccaaaaggccatggggaccaatgtcgtgagggtggatgtgaagttgaacaagtttgtctggagccagggaatca

SEQ ID NO: 12928 - DNA, 268 bp, Glycine max
  Clone ID: 701066408H1
gagcgagcgagcgagcagtttcaaagagaggatttgggattgggaaggcgagggattgcgctgcgtctcttcctcttctctttcgattcatccctcattcataatcttccaatccaacaacctcagcctcacactcacacatacacacatctgaacgcgtatcgtccctcccatggcttcaaagcgcatcctcaaggagctcaaggacttgcagacagacccaccaacttcttgcagcgctggtccagtagctgaggacatgttccat

SEQ ID NO: 12929 - DNA, 266 bp, Glycine max
  Clone ID: 701066410H1
gatcgagataactagaaacagtgtgatgaaaatgaaggtccttgttttcttcgttgctacaattttcgtagcatggcaatgccatgcgtacgatatgttccctctccgaatgaacactggctatggtgcccgtactccggaggtgaaatgcgcaagttggaggcttgctgtggaagcacacaacatctttggctttgagaccattcctgaagagtgcgttgaagcaacaaaggaatacatccatggcgaacaatatagatcagact

SEQ ID NO: 12930 - DNA, 89 bp, Glycine max
  Clone ID: 701066411H1
ctagttctagatcgcgagcggcccccttatgtgtattttttttggaggaagcttactgaaagttaatgggtcattagaaagtcctcaat

SEQ ID NO: 12931 - DNA, 256 bp, Glycine max
  Clone ID: 701066412H1
ctctttcttcctcttcctcagtagtgcgattttcgattctcttctctgcaactatgcctaaccctaaggtcttcttcgacatgaccatcggcggtcaacctgccggccgcatcgtgatggagctctacgccgacgtgactccgagcaccgccgagaacttccgtgcgctctgcaccggcgagaacggcgcgggcgcgacggcaaacccctccactacaaaggctcgtccttccaccgggtgatcccgaaattcatg

SEQ ID NO: 12932 - DNA, 175 bp, Glycine max
  Clone ID: 701066414H1
atcgagccgtttcaatagctttggtgaatagtacatacatgatgatgctctagtaaaagtattttgctttatacttaaattactattacagtattatgcttaggtttttctttctagtacaaaaatcaattgcggtgtgtgaatttgtgaaataagaagaaacgaattcgttttg

SEQ ID NO: 12933 - DNA, 274 bp, Glycine max
  Clone ID: 701066415H1
agattctagtcacaatgctggatacaaaggaagaagtaccttcaacatttataggacagaatgtctcttttagtgatgcaacgaaacagtgccgacatggcgaggcacgtaatgtgtccatcccctaacagaagggtcagcatcaccttcttcagagtgaggccagactccaaccaatgccaatctccaactcctactacgatgacaagtgcgatgactgtgtggcaacctgggcattgcgctagtccatatgctttgccaaatggtgctctaa

SEQ ID NO: 12934 - DNA, 92 bp, Glycine max
  Clone ID: 701066416H1
ccactttgtagtgaggctggggggagaaacaatggggtctctaatggcctctgccacattgactcttgtattggcaatagtgtctctaagct

SEQ ID NO: 12935 - DNA, 270 bp, Glycine max
  Clone ID: 701066418H1
ctttcctttccagttcatacttcatcctattattactttccctctctgcattccaaatggccactgttgaggttgcacagcaaacaccaacaactgtgacagagaatgaaacaacgactgaggtaaccaagattgaggaaactaccccagaacagccagccaccgaggttactgccccagaaacagtcaacgaagaagcaaaagaggaagcagcagttgagactaatgaggcaacagaagttacagaggaagggaaggctgagacaacag

SEQ ID NO: 12936 - DNA, 272 bp, Glycine max
  Clone ID: 701066419H1
gttctctgaaattttaattgacttttctcccctcataaaaaaaacctaccaatggctcccgcaaaggcagagaagaataccgcggagaagaagccggcagagaaggccccagcggagaagaagccgaagggcaagaagaagatatcgaaggaaggaggaagcgagaagaagaagaagagaacaaagaagagcgttgagacctacaagatctacatcttcaaggtgttgcagcaagtgcacccgacatcgggatctccagcaaggctatgggg

SEQ ID NO: 12937 - DNA, 264 bp, Glycine max
  Clone ID: 701066421H1
cgaacacacactttgattgagaatggggcgtgttcgcacaaagacagtgaatccgcctcgcggcaagtgatcgagaggtactactctcgcatgacgctggacttccacacgaacaagaaggttctggaagaggtggccatcattccctccaagacgctccgcaacaagatcgcgggattctccacccacctcatgaagcggatccagaagggtcacgtacgtggaatctccctcaagctgcaggaggaggagcgcgaggccgca

SEQ ID NO: 12938 - DNA, 267 bp, Glycine max
  Clone ID: 701066422H1
gcacctttaaacgccgaaggttcatccaatctccgaaggccttcaccggattgcaaccatgtcgaggagaaaggttagagagccaaaggaggaaaacgtgactctgggcccagctgttagagatggtgaacatgtttctggagtcgctcgcatctttgcctccttcaatgacacctttattcatgtcactgatctgtctgggagggaaacacttgtctccatcactggcgggatgaaggttaaagctgacagagatgaatcatctcc

SEQ ID NO: 12939 - DNA, 222 bp, Glycine max
  Clone ID: 701066423H1
gagcagaagaagaagaagagaaggtggtaccgccttcaattctctttttctctctccatttctcatcctcatcatcttattattcctcttccatctctattctccataacacccaccacaccacttgtgaaaaacctcattaatatcacacactgacatgtatctctgagctccaatccaatagaagaccacaccttgtcgtgtcggacgaaccttggtgtc

SEQ ID NO: 12940 - DNA, 268 bp, Glycine max
  Clone ID: 701066424H1
tatcactctcaactctgcttcttttcaatcagttacattttctttggtattccaatggccactgttgaggttgtgtcagcaaaggtttccctcccagaggacacaaaagaggcatcattgaaggctgatgagaagaagaacacagaagaagttgttgagactccaacaccaacaccagaaaatgtcgtcactgagcaaacaaaggaggaaagtactgaggcaccacaacctgcagcttcagaagacaagccctcggttgaagttgtgt

SEQ ID NO: 12941 - DNA, 260 bp, Glycine max
  Clone ID: 701066425H1
ctggctctctaagaaacatggctgaagagggtcaggttgtcggcgtccacaccgttgatgcgtggaaccagcaactgcagaatggaaaagactcccaaaaattgattgtggtggattttactgcttcctggtgtggtccatgccgttttattgccccagttctggcagagattgctaggcatactcctcaagtgatcttcctcaaggtggatgtggatgaagtgaggcctgttgctgaggaatattccattgaggccatg

SEQ ID NO: 12942 - DNA, 268 bp, Glycine max
  Clone ID: 701066426H1
cctacctctttttcttctctctcaacaacttcaccttcttcctcctcgatcatgtctcacttcaagggcaagtaccatgatgagcttatcgccaatgctgcgtacattggcactcctggaaagggtattcttgctgctgatgagtcaacagggacaattggcaagcgtttggccagcatcagtgtagagaacattgaatccaacaggcgagctcttagggagctgcttttcactgctcctggtgttcttcaatatctcagtggtgtca

SEQ ID NO: 12943 - DNA, 264 bp, Glycine max
  Clone ID: 701066427H1
ctcagatgaatttggtagattggtttaaggcaatggtagcatctcgtcgcagtgaggagctagttgatcctttaattgagattcctccccctccaagatctttgaagagagttttattgatttgtctgcgctgtatagacatggatgtcgtaaagcgaccaaagatgggtcaaattattcatatgcttgagacagatgatttcccctttcgttctgtaagtactacacttcatccctccttctcagtttctcacaaatacattt

SEQ ID NO: 12944 - DNA, 266 bp, Glycine max
  Clone ID: 701066428H1
gaagaaacaaaaccgaacctctctaaactctccaacgtcgccacccgattcatcgcatttcgcaggctgcaatggcgacgttcgaactgtaccgcaggtcgacgattggaatgtgcctgacggagacgctggacgagatggttcagaacggcactctaagccccgagctcgcgattcaggttctggtccaattcgataagtccatgactgaggttctggaaacgccagtttcagagtaaggtctcccatcaggggacatctccata

SEQ ID NO: 12945 - DNA, 272 bp, Glycine max
  Clone ID: 701066430H1
ctgactatcccttcaagccaccaaaggttgcttttcggactaaggtgttccacccaaacatcaacagcaatggcagtatatgtcttgacattctcaaggaacaatggagcccagctctaaccatttccaaggtccttttgtcaatttgctcattgttgacggatcccaaccctgatgatccacttgtacctgagattgcacacatgtacaagaccgacacggccaagtatgaggctacagcccgcagctggacccagaagtatgccatggga

SEQ ID NO: 12946 - DNA, 263 bp, Glycine max
  Clone ID: 701066431H1
aggaatcggtggctgagattcgtcgtaaagtggaccccaccaccagcgtcgtgcttgggaaggaagtgttctccctttgcgttaagcctggttttgatgcggcttttgccatggggtttgtgcttgtcctagatcagatcaacggtgaggattacgttgatgatcgtgcctacacggagcctgcggtgcaccccgccacagaagattagaaaggaatagagtggatttccagatttttcttcaatcacactgggatgatgggt

SEQ ID NO: 12947 - DNA, 239 bp, Glycine max
  Clone ID: 701066432H1
cttcacttctccaacatgccaaacgacagcgttctgagtcttttcttcttcgttaccctcttcacatgccttctctctgctaattcccacgatgaccatattttcctaccgagtcaactccatgacgatgactcagtgagttgcactgctaccgacccaaaccttaactacaagccggtgatcggaatcctgacccaccccggcgacggtgcctctggccggctcagcaagccaccggg

SEQ ID NO: 12948 - DNA, 233 bp, Glycine max
  Clone ID: 701066433H1
cggggtgaagcatggcctcgtggccacccaaacctgcagagatattttgttcgtttgagtgtgagagagcaatcgatggcctcatcaccatgtgattgctggccccattcttctacttgcttctacttcttccattgaagatgtctggaacggcatcaaactagcctctctctccaattcctccgttggcttagagttgaacaacaacaaccatctgtctccgtttgtggtgt

SEQ ID NO: 12949 - DNA, 217 bp, Glycine max
  Clone ID: 701066434H1
gcaaaaaggaggcaaatcatcaaagatcccaaaggacttccttgtacagatgcatggggaacaacgtgtcaccaagtgttcagtgcaagaaatactcaattctaccatggctgtttatgtgaaaccggaatacttggatgtaaaggaccggaagataagcactacgcaaacgctagaacaactcaaaacatcattcaagccaggaaatgaatttggc

SEQ ID NO: 12950 - DNA, 269 bp, Glycine max
  Clone ID: 701066435H1
tggcgaacaatttagatcagactctaaaacagttaaacaacaagctttcttttatgctagtgaacgcgaagtccaacacaacgacatatttatattcggcatagataacaccgtactctctaatatcccatactatgaaaaacatggatatggggtggaggaatttaatgaaaccttatatgatgaatgggttaacaagggcgacgcaccggcattgccagagactcttgaaaattccaacaagctgttgtcccttggcttcaggattg

SEQ ID NO: 12951 - DNA, 260 bp, Glycine max
  Clone ID: 701066438H1
gtggactttgttttcttttaggcctttatgcaatgcacatacaacaggaacagatatactatgggcaggtttgccaatggttactctgcctcttgagaaaatggctactagggttgctgggtcactctgtcttgccactggactaggggaggagatgattgttagcagcatggaagagtatgaagatagagcagtctcattggctctgaatcggccggagcttcacgctcttactaataagcttaaagctgtacgcatga

SEQ ID NO: 12952 - DNA, 250 bp, Glycine max
  Clone ID: 701066439H1
caaaaactcagaaaacacagggaaagaaagagttgagtgatggacggttgtctggaactgatggaatgcaaaatagcgagaccctttgactcattaccggtgagaaggtcaattcctttgagtctgatgtgttcggccgagacctattcttcaaagccgacgcgcttctaaagcatcactctcatccccggctacggaatcgcggccgagatcattcaggtagacaaagacgttcttgatcatcgacggt

SEQ ID NO: 12953 - DNA, 264 bp, Glycine max
  Clone ID: 701066440H1
caaaattgcgaagaaccctaattgattgattgattgattgattcccatggcgtcccgaagaggtggagtctcactcccagaaagaccaagcaacaactcaggctccgtcctggcgaagatctcgcgctcctccatcgtcacccgcggcaaggaagccgccgtccacgccgcattcgtcgccaagaagctcctccgcagcaccggcaaggccgcgtggatcgccggcaccaccttctcgtcctcgtcgtcctctgatcgtcgaga

SEQ ID NO: 12954 - DNA, 267 bp, Glycine max
  Clone ID: 701066441H1
cagagtagtgagtagtgagagggcgaacgactgaatgccccagatcgttacgagcgtttcgtcgtccctgaaggcaccaaaaaggtttcttatgagagggacacgaagatcatcaatgcggcgtccttcaccatcgagagacaggagcacactatcggcaacatcctccgcatgcagctgtacagagaccccaatgtcttgtttgccggatacaagcttcctcatcctcttcaataccaaattattgtcaggatacacaccactagt

SEQ ID NO: 12955 - DNA, 259 bp, Glycine max
  Clone ID: 701066442H1
ttcaaaacaaaatgctaaagagaaagaggtaaatctggtaaagcgtgatagatcatacaaaagaacaagaaacaaatggagcaatcctggttgcaagaactttaagatattcacttttctatatagaaaagacattccaaaagctttcttttacagcaccctcaacttgaagagattagggagctttaatagaaaacaatttttgcacttcatgaagatgaagatagaagaaccatcatctcgagatgtaggaagtgtt

SEQ ID NO: 12956 - DNA, 178 bp, Glycine max
  Clone ID: 701066443H1
agccttcgaagcatgtagtcaattactgttgtatacctagcttactgccattcattatattctcaacaaggtatgagggtgtagtttggtttctttctgattgtttaatcagtagaaagataaagaataagaaattgtagactttactgggtagttatgtggatgaagaaagttcagt

SEQ ID NO: 12957 - DNA, 269 bp, Glycine max
  Clone ID: 701066444H1
cgacaagtcataatcgtggatcacgttcttcgacccgaaggcaacgaactcttcacagacgttggcatcgcattcgacatgatgcttctcgctcacaacgccggtggcaaagagatgaccgaagagaactggaagtggctgttcaaggaaaccggtttcgcgcgtcacaacatcatcaagatcaacgctctcccttccatcatttgagcgtttccattctgaagaggatgccactaccaaaactggatgtgggttttatgttgcatggg

SEQ ID NO: 12958 - DNA, 180 bp, Glycine max
  Clone ID: 701066451H1
tgttgtaacaaagaagtgtagtagcggcgccaagaggagcggtctcacgaaagcaccagcgtcaagtgacagcatcggatacccaactgcatggtagcaagatcagacgaaactgaagttggaggaagattcaaggccctctctgagatcactgaggtgtgatctcgttgcaaggatcag

SEQ ID NO: 12959 - DNA, 253 bp, Glycine max
  Clone ID: 701066455H1
aaaacatcaagatcttgatggtgatgatgatgaggaggaggagaaggattcctacttaattgagcttcatcttctagctaaacatgtttaaagttataatgttttggttactaatcactagttaattgtggattttcttggcactctatttcaggcaatacgcatgctatcttggcgattgttttgggttgatttatgtcaaatagagcaaaatgggccaaacgaatggtttgtactttgtacttcttaggtt

SEQ ID NO: 12960 - DNA, 248 bp, Glycine max
  Clone ID: 701066456H1
ttctgctcgatgttcaaagatgaagatgatccacgttcttttcctctttgctcttgtctcgatcacttaccatgcttcagaccgtgatttctgtgtagcacacctgaagaggtccagatacgcattcatgctatcagttgaaaccacctaacacagtcacagtggatgacttgtgcactctggctttgtagctggaaacaccacaaacactttcagtgctgcattacgctccgcaattgttactgatt

SEQ ID NO: 12961 - DNA, 263 bp, Glycine max
  Clone ID: 701066457H1
cggctcgagattgtttgttgttgtaactcgttcttcttcttttgttgttctgtgtttgtgtttgctttttctctcacctgaaaatgtcttgctgcggtggtaactgtggttgcggaagctcctgcaagtgcggcaacggctgcggaggctgcaagatgtacccagacttgagctacactgagtcaaccaccaccgagaccttggtcatgggagtggcacctgttaaggctcaatttgagggtgctgaaatgggtgtgcccgct

SEQ ID NO: 12962 - DNA, 263 bp, Glycine max
  Clone ID: 701066458H1
gatcgagataactagaaacagtgtgatgaaaatgaaggtccttgttttcttcgttgctacaattttcgtagcatggcaatgccatgcgtacgatatgttccctctccgaatgaacactggctatggtgcccgtactccggaggtgaaatgcgcaagttggaggcttgctgtggaagcacacaacatctttggctttgagaccattcctgaagagtgcgttgaagcaacaaaggaatacatccatggcgaacaatatagatcag

SEQ ID NO: 12963 - DNA, 235 bp, Glycine max
  Clone ID: 701066460H1
gagacatcagtgcctccttctggtctccctggtgttggtctcctacgctgcccggtcggaatcagcgctgggcggctggagccccatcaaggacgtaaacgacagccacgtggcggagatcgccaactacgcgctgagcgagtacgacaagcgttctggggccaagctcacccctgtcaaggtcgtcaagggcgagactcaggtcgtttccggcaccaactaccgtctcgtcctc

SEQ ID NO: 12964 - DNA, 168 bp, Glycine max
  Clone ID: 701066461H1
cggcaacggatatctcggctcttgcatcgatgaagaacgtagcgaaatgcgatacttggtgtgaattgcagaatcccgtgaaccatcgagtctttgaacgcaagttgcgcccgaagccattaggccgagggcacgcctgcctgggtgtcacacatcgtttcaaaagaa

SEQ ID NO: 12965 - DNA, 101 bp, Glycine max
  Clone ID: 701066462H1
agagtttgttgtgagctataagctagtttatcgtgaggagaatatgaagttgtttgtcttctttgttgctgcagtacttttggtagcatggccatgccatg

SEQ ID NO: 12966 - DNA, 238 bp, Glycine max
  Clone ID: 701066465H1
agcttcggattcagctagtgccttgatggatcaatatggtctcgtctggagttatgggcaattttcggcctcggcgtcgccggcgacgtcttcgggccgatggtggatctcgcttgacgccgtcgtctgtagtaccgtcaccgttcccttccttcattaccttcccggaattttcgcatctcttgccggttacgatgcgcattgcgttagaaaagaagacatcgattattctccctac

SEQ ID NO: 12967 - DNA, 250 bp, Glycine max
  Clone ID: 701066466H1
ttcatcattcaatactatattggactataagctttgattcttctaaattcatacgctactcacgctcattcatagcagagagtatggattgctgcatggaatggagtacatgctgaggtgaccaagatatgggtgcctaccccaggatatacatgatactttgtaaccgctcaagactggtcttgcgagagcatgtggccgaaacattagagggtatatggccggcaaccttggtcatgggggaagggaa

SEQ ID NO: 12968 - DNA, 262 bp, Glycine max
  Clone ID: 701066471H1
ggaaagatgagtagttcatcaaggccggtgccgaggagagagagtccatggggagtcaccggagagaatcatcctgaacccacagctcaccgctgcaatgaccgtgtcgaggacattattcaggcttgatttgagggatacccattcaagactgttccgggagctttcaagctcttctggcagtgcatgtgttccaaacccggtgaggaaccaacagccgcatttacttatctggatttggagcctctaaagagagaaacgg

SEQ ID NO: 12969 - DNA, 140 bp, Glycine max
  Clone ID: 701066472H1
aaggaatttaagtgaggccgcagagaatgatgatgaagtctgctatgtgtgcagtggtggtcgtaccacttcttcttctggcggaggtggggcccatggctgaggctgtgacatgcaccccagacaggttgagtccgtgt

SEQ ID NO: 12970 - DNA, 248 bp, Glycine max
  Clone ID: 701066473H1
tggagatactgttgggggtcttttaaatgctacatttggaaatgcaacagagctgatcatctccatatatgcactgacaagtggaattacacgcgttgtccagctctctttgctgggttcaattttgtccagatatgttactggtgcttgggtgtgcattcttatgtggtgggattgttaatcacgagaagtagcaagtgtttaactagtgcagcaactgggagctcaatgtacctggctagaacact

SEQ ID NO: 12971 - DNA, 250 bp, Glycine max
  Clone ID: 701066474H1
cttcttcgttccttccccaactcaatcttcgccttcgtccacaacaactcctccttcacgatcgctgccaacgttactttccatttgtaaccttcatgctcgagacaaaaattgcgaacgcagcatctggtattgccgtccatgctgagtgcaagctacagtttctggagatcaacgcgaacaggacgtaccggtatatcgttttcaggattgaggagaaatcgcagcaagttattgtggagaagccggg

SEQ ID NO: 12972 - DNA, 210 bp, Glycine max
  Clone ID: 701066475H1
gttctcttctttctttcgatcagggtttcccctcgtctccgggctcgtttcgttctcgaataatcgatctacgataatgactcgcggtagccagacggatcgtgatcgcgaaagggctcatgctagaactggtgctaaaggcaagcagaaagatgatggattgacccctgaacagcgcagggaaagagatgcataggcgctgcaggagaa

SEQ ID NO: 12973 - DNA, 166 bp, Glycine max
  Clone ID: 701066480H1
gtacgtagaataggcaatgtctgatggtataaaatgttgtaaccctcgactcgagtgattgtcatggtattcctatattatatctgatgtactgacctgcattgattaatagccattagattaaaacatggaaaatgcttctaccgtgacagcataacgtaatttt

SEQ ID NO: 12974 - DNA, 259 bp, Glycine max
  Clone ID: 701066481H1
tctcaatcacctcaatttcacttctctgctccaaagtttcaatcttttctctgaaatcccaaatgggcatcgccacaatcaaaatgggagccaactccgactccaactgttccatcactccacgccattacaacacccacaaggtgttccttttctgcaactacattctcttgggtgcagcctccagctccatcttcctcatcctctccctgcggctcattccctctctatgggggctctcctccatcttcttcaggtc

SEQ ID NO: 12975 - DNA, 258 bp, Glycine max
  Clone ID: 701066482H1
actctctctgtgttcttctgttctctctgtttcttcagattttctccctcctcagcgcctgtgaagtttgattgcttcattctttgaagtgaatttgacaattaagtaaattggttgagaagggttcattcctcttcattggaagaataaaacaaatattgcaggtggattttttctgatggcaaataatgaaaatcttgcaccaaatgtaataaagcacctagccaaggaattaaaaaatattgatgaatcactcct

SEQ ID NO: 12976 - DNA, 260 bp, Glycine max
  Clone ID: 701066484H1
actattactactactacatcatcatcatcatcatccatggaacaagaagataacactatcatacccacattcctcagaaaacctgcagcagaccagaacaacaacaacaacaacaacaacaactctcccaccaccccttctcacaagtctttgcatgttttccgccgcagcaggaggcggtggaggaaggaagtggcagtgaaagaagatcaagatgttgatgagggtgatgacagagaagagatagagaggaagattca

SEQ ID NO: 12977 - DNA, 224 bp, Glycine max
  Clone ID: 701066485H1
gcctcggctatggttcggaaacgaagaagggttctgtcatcatatccctatgaggggcgagtggaagaagaagcgtatgaggagcgctgaagacgaagcgccgaaagatgagacagagatccaagtagtgcgttcaacctagtttgtttccgttgcttttagaattgcctatgttgtcaaataggacacccagttcttagtgggactgggctctgcttgttgat

SEQ ID NO: 12978 - DNA, 263 bp, Glycine max
  Clone ID: 701066487H1
cactcttctcctaagctctagcacttaactagcaatattaattagcatttgctagagagactaggagtatgaacataacccagtttaagatggcttcaaaaacttgttcctcccttgcccttttcctcacactcaacctcaatttcttctcagttgtttctgcatgcggttatacaccatggcctggtccagacccaaagccaaggcccaaccccaaccctaaccctaaccctagcccaagtggctcctgcccccgtgatgca

SEQ ID NO: 12979 - DNA, 246 bp, Glycine max
  Clone ID: 701066488H1
ctttcttggaactttgttactctcacacatgtctcgctccgtgcctatggtttcaaccattttcctcttgcttctgcttctggtggccactgagatgatggggccaacaatggtggcagaagcaagaacttgtgagtctcagagccaccgtttcaaggggccatgtttgagtgacaccaactgtggctctgtttgccgaaccgaacgtttcactggaggacactgccgtggcttccgtcgcagatg

SEQ ID NO: 12980 - DNA, 221 bp, Glycine max
  Clone ID: 701066489H1
cgatgatagaaagaagattagtggagacggggggttagtgaaggttgagccataacccagcagtggtttcacctcaaaagtggttgatttgttggagaaattggtggtgaagttcttgtatggttcttcactggcccatcactacctcactggtaattttgctcccgtgagtgcgaccctccaaccaaggaccttcctgtcagagggtacttccggattgc

SEQ ID NO: 12981 - DNA, 212 bp, Glycine max
  Clone ID: 701066490H1
actcgagccgctcgagccgctcgagcggctcgaggtcacccaccaaacacgtcgagccacagcaacagaaccatcagactgttgaactcgaccaacaccaacccatccccgaaccaaccctagaagactccaacaccatggccatcgacgaaccaaaacatgaacaagaagaagaaccgcaaaaccccgcgagcgaacaagaggtagagtaa

SEQ ID NO: 12982 - DNA, 246 bp, Glycine max
  Clone ID: 701066491H1
agacagtcgtacgtgttcacgcaagaaaccttgttctcttggaagaataacgataaatagacatagcgggagacgtaacaaaaaaataagaaaagcaactgaatttccaatcctgagaccgcaaggacaatataactcagaaccttattcttcagtgtcgcttttaccaaaacgccaaaatcgccctgtagactgtacactgagactggttttaaagcaaagcacttgttccagccatggctcctc

SEQ ID NO: 12983 - DNA, 266 bp, Glycine max
  unsure at all n locations
  Clone ID: 701066492H1
gtgaaagacaatccgaggcgaagagaagagaaaaattaagatggaggggaaggagcaggatgtctcgctgggagcgaacaagttcccggagagacagccgattgggacggcggcgcagagccaagacgacggcaaggactaccaggagccggcgccggcgccactggttgacccgacggagtttacgtcatggtccttttacagagcagggatagcagagtttgtggccacttttctcgntctatacatcactgtcttaaccgtca

SEQ ID NO: 12984 - DNA, 271 bp, Glycine max
  Clone ID: 701066495H1
tggtatctctctgtatattcaaatacacagtatactatcacattcgcttcggtacttctctcttcattgtcgcagacacaaagcagcactaaaggaagcccttcactacgccgattaagcatgtcaggcagaaaagaaacggttttggaccttgcaaagtttgtagacaaaggcgttcaagttaagcttactggtggaagacaagtgacagggactctgaaagggtatgatcaattgcttaaccttggtctagatgaagctgtagagtttt

SEQ ID NO: 12985 - DNA, 227 bp, Glycine max
  Clone ID: 701066496H1
caaagcagtattattaaagaagtgtagacagaaggtgagcaatggaggttcatgtagtttaatcttctgccaaaacgttgaatgtcttgttcctgttcaaatcatccttttgaaattttgaatccacataattgaaatgcttaattcatttttattttgttgcaactagatgtagtacgacatcaattaatgagtttgatatagtcttgaaacttgcatccggtttt

SEQ ID NO: 12986 - DNA, 277 bp, Glycine max
  Clone ID: 701066501H1
catatattcacaacttcttccatggaggactgggcgggcctctcatgagtagaatatgatgcatagaagcatcttatagcagctgaagtctcgagtatattacagagtagcttgtttcctggtcttagatcatccattgattttatggtggagggatacctaagatacatcggcgatagctggctcgtgatgagggaccttatggtcccatgggacgcagaatccccgaggggttattgggaatggcattctgtaacacaggcttagatggtcgtta

SEQ ID NO: 12987 - DNA, 288 bp, Glycine max
  Clone ID: 701066502H1
cagtcggtctacgcgtaaaggcttctcatccttttgttttcctttttgaaagacaagtttagcaattgaaagatagtttctaacgccatgataacagatcatacaaaaataataatagccaataatttaatccaagtgaagccaaaactaccaagctcaaaggaggaagattgattctgaaccagagagtactcaacccaaatcctggcagattggagaggatatgatgaagaaccaggaaacaacagcccccaatgaaaggggtccaatgctgcaaaaactaatagg

SEQ ID NO: 12988 - DNA, 273 bp, Glycine max
  Clone ID: 701066503H1
gtgcaaaagagcgtcgtagtcgcaaccctaatcagaagaagcgcagttcaagcgagtgacagccaccagccatgggtcgtatgcacagccgcggtaagggtatatcctcttctgctttgccctacaaaaggacacctcctagctggctcaagatctcttcgcaagatgtcgaagaaaatatctgcaagtttgcgaagaaaggtttgaccccgtctcagattggtgtcattctcagagattctcacggtattgctcaggtcaatagcgtcactg

SEQ ID NO: 12989 - DNA, 270 bp, Glycine max
  Clone ID: 701066504H1
gaggaattatgtgctgcatagcccactcaggaccaaattcttcagcaaggcgtttcaagttgttagcagctgcttcacgaattgaatgaaccttatcctgtaaccactgcatgcaaagagcaccaagcttgtcatcgaaaaaactaaccccaattgacttgccaataagggtatatattctataattgcaagccggaccctccaatgcctatcctcagcaagctcaacaatggctggtaacaaagactgagataacagatcaattcctat

SEQ ID NO: 12990 - DNA, 268 bp, Glycine max
  unsure at all n locations
  Clone ID: 701066505H1
cagaaaattgacgcaattccacacaagatacgacgcgcggtgtctggtttgaaagtgaaatagnnnngataaaaaagtcccgcatgatggacttgttnccttttgagcaaagtttgtgacttgaagagagaagaaaaaggatgagccacggatgatgacgagccagaaaggagaagaagattgacagcgtcgaatagtggtgggttgaagagctttcagcgcgatctgatcgctggggcggtgatgggtggtggggtgcacacgattg

SEQ ID NO: 12991 - DNA, 268 bp, Glycine max
  Clone ID: 701066506H1
cctccgaactccgaagcccttcagcaaccatgtcgaggagaaaggttagggagccaaaggacgaaaatgtcactcttggtccagccgttagagacggtgaacatgttttcggcgtggctcgcatctttgcctccttcaacgacacctcatccatgtcactgatttgtctgggagggaaacccttgttcgcatcactggtgggatgaaagttaaagctgacagagatgaatcatctccatatgctgctatgcttgcagcacaggatgtt

SEQ ID NO: 12992 - DNA, 265 bp, Glycine max
  Clone ID: 701066507H1
ccgtctctccaacctttcactttcgtttctcagttttattcgaatccctctctcaatctcctttccaaatggccagcgttgaggttgcacagcaaacaccaacaacagttccagaaaatgagacaaccgaggtaagcaagacccaggaacaaccccagtcactgaggctcctgcaacagaacaaccagcagctgacgttgctgcaacagaagaaccagccgctgaggctcctgccccataatcaacaccgcagcaccaaaggcag

SEQ ID NO: 12993 - DNA, 268 bp, Glycine max
  Clone ID: 701066508H1
gtgcaaatagagtggtctttgtggactcgtgacattgaagaagagatagtccctctctgcagggaacttggtattggaattgtaccatatagtcctcttggtcgtggcttttttggcggcaaaggagttgtggaaaatgtgcctaaaatagctccctgaaagcacatccacgctttcaagccgagaacttagacaagaacaagaatatatatgaacgaattgaaggccttgctaagaagcatcaggccactcctgcccagttggcatt

SEQ ID NO: 12994 - DNA, 267 bp, Glycine max
  Clone ID: 701066509H1
cgttctttgtctcgcaatcttcactattttcaccgagcatttgcattccacattgaatatggctcaggctacacaatctaatgctgagttattggagtggcctaagaaagataagcgccgcttcctgcatgttgtgtatcgtgttgtgatcttgatcgcaccattaagttttatactgaatgttttgggatgaagcttttgaggaaaagagatattccagaagagaaatatgccaatgcttttcttggatttggccctgaacaatcc

SEQ ID NO: 12995 - DNA, 270 bp, Glycine max
  Clone ID: 701066510H1
cgtttcctagccgaaaccctagctagctctttcttaatccataatctctcttctcttcttctctttacatctgcaaaacaaaaatgtctcacttcggacgttcgggtcccccagacatttccgacacttactctcttctcgttctaacatcaccttccgtaccaccgccgacgacctattccctctcttcgacaagtacgggaaggtcgtcgacatcttcatccccaaggatcgaagaactggtgagtcaaggggttttgcattcgtgcg

SEQ ID NO: 12996 - DNA, 267 bp, Glycine max
  Clone ID: 701066511H1
ctcattaattgcaagaatggcacttcgttgcttggtgatgtccctttctgttctcttcactcttggtcttgcgagagaaagccatgccagagacgaagatttttggcatgctgtttggccaaacactcccattccaagttcattggagatcttctaaagcctggccctgcaagtgttgaaatcgatgatcaccctatgcaaattgaagaaacacagtacccgaaaaccttcttctataaagaagaccttcatccaggcaaaacaatg

SEQ ID NO: 12997 - DNA, 269 bp, Glycine max
  Clone ID: 701066512H1
cctgctcgcgtgtcgattctccaccactattcccttcaccccaatcacactttccggtagctgctgctattagtgcagcagcactgtccgctggatgcaacaacggctgtacttggtcttctacttttatatttgggcaaggctgagctagggacaaaatatccagggcaatacaatatggttccaaatttttgagtcatggggaacctggtactgctcataatgtccacataacaaccagcttggcacgcaaagtcttccgtctcttt

SEQ ID NO: 12998 - DNA, 268 bp, Glycine max
  Clone ID: 701066513H1
gtttaacgaacctcgtgtggtggctgctcttggctatgataatggtttctttgcccctggaagatgctcaaacgaatatgggaattgtactgctggcaactcaggcactgagccttacattgttgcccacaatttgatattgtccatgcagcagctgttcaaagataccgagcgaagtaccaagaaaagcaaaagggaaggattgggatcctcttggattttgtttggtatgagcctcttacaagatcaaaggctgacaattttgcag

SEQ ID NO: 12999 - DNA, 270 bp, Glycine max
  Clone ID: 701066514H1
caaatcaaagccatggccacctccaacttctctattgttctctccgtctccctagccttctttttggtgctacttaccaaggcacactcgaccgataccgtttctttcaccttcaacaagttcaacccagtccaaccaaacattagctccaaaaagatgctagtatttcatcctctggggtgttacaactcaccaaagttggcagcaacggcgtgcccacctcgggatctctcggtcgtgccctttacgctgccccaatccagatttggg

SEQ ID NO: 13000 - DNA, 271 bp, Glycine max
  Clone ID: 701066515H1
ctttctctctctctctctctcacccagatcttgtagcaatggcgagcgctcccactccacgcgaagagttcgtgtacatggcgaagctggcggagcaggccgagcgctacgaggagatggtggagttcatggagaaggtctccgccccgccgagagcgaggagctgaccgtggaggagcgtaacctcctctccgtcgcctacaagaacgtgatcggcgctcgccgcgcctcctggcgcatcatctcctcaatcgagcagaaggaggagagc

SEQ ID NO: 13001 - DNA, 244 bp, Glycine max
  Clone ID: 701066516H1
acccgttacgttgaatgtaaagctttggacagccgtaaaagcaatcatgcgaactctttctccgattcagtattttaattttcccttttgagtcgaaggagaccagaaatgaagtgaatggggacatgagaaaaggagggaaggaagtggggcttgtgatgatgaaaaggaagaaaagatgtgaggtagtgatgggatgtgagagctagaaaacagggtgttaaatgtgcttcttgtttgtttg

SEQ ID NO: 13002 - DNA, 266 bp, Glycine max
  Clone ID: 701066517H1
cgcagagctgcatccatgccacaccagtttttcagttataaactccctgaatcctcacaagggacgacggataagcgttgctgttccacccaagtttccaaacttccggagggaagcatctctgcaggggaatttggaggctatagagtcccaacttcggtgcctgtgcgtgtagcatacgagcttcttctagctggtcatcgatatttggatgtaaggaccccggaagagttcgatgctggacacgctcctggcgcaattaacat

SEQ ID NO: 13003 - DNA, 269 bp, Glycine max
  Clone ID: 701066519H1
gagaaagaagggggagctatagccataaggagaaaaactttcaaagaagtgaaagcaaaaaagagttgttcttttcctttctgctgataagctgtgtgagtgagttcattgacaagcctgaaatgacaactatgctgacaaatgagatggtctgagtttgaacctcaaggagactgagctttgcctcggtttgcctggcgggggctctgaagtggaaactccaagggccactgggaagagagggttctctgagaccgttgatctgaagc

SEQ ID NO: 13004 - DNA, 267 bp, Glycine max
  Clone ID: 701066520H1
cgcttgatgatgcagtccacacagcaatattgactctgaaggaagggtttgagggacagatctcaggaaaaaacattgaaattggcataattggagctgataaaaagttcagggtattgacaccagctgaaattgacgactatttgctgaagtagaataatctgcaatgaagaactcttgtgttcctgaagttgtttgtttcacagttgggtttaattggtagcttaattattgacattgtgatggcaatagtgaatttgcgagcta

SEQ ID NO: 13005 - DNA, 269 bp, Glycine max
  Clone ID: 701066521H1
ggtcgaggtcgaaatctcgaaggcgagacataaattgaaactgaagcagcatatcatatgattccacgatggaagtgtctgcatcagcatcaaggaggaggaacaacagcatatgcataaaaatctcgttgcttattctcgtaatcttcacttttcatccacaatcactgctatcaggaaagatgttggctttcaaatcattcatccctgcaaaaccaccgttcaaggaagatacctcctttcagatgataacggttatgtgtgtaatg

SEQ ID NO: 13006 - DNA, 265 bp, Glycine max
  Clone ID: 701066522H1
caacaacaccctcaaaccgatcatcagaggcgtttgctctcatggcaatcctcagcactctgctttgcacggcggtggcggcgaaggagagcgtgtacgagatactccccaagtacggcctcccgagcggtctgttaccggacacgtcaccgactacacgctcgacgaggacgggcaattcgtcgtcgttttggcgaaccctgctacatacagttcgattacttagtttactacgagaccaagatctccggcaagctcagctatg

SEQ ID NO: 13007 - DNA, 270 bp, Glycine max
  Clone ID: 701066523H1
ctcagaaccaaactcagaaccaaactcagaaccaaactcgccaaaactagggttttgcattgatggcactgtgcaaccgcgtcagatcgggaatctctctcttcaccaaatccacgttccttacttcccagcgatccagtctccacgatccctcgtctgcccctttcatttccctcgcctccagaaattacgccaacgtgccggggcaaaaggaaaccaaagttaaggtccctctggctttgtttggaggttcaggaaactatgcctctg

SEQ ID NO: 13008 - DNA, 269 bp, Glycine max
  Clone ID: 701066524H1
caagatgtcgaagagaggacgcggtggttcggcggggaacaagttccggatgtcgctgggtctgccggtggcggcgacggtgaactgcgccgacaatacgggggcgaagaacctctacatcatatcggtgaaagggatcaaaggggtttgaaccgtctcccctcggcttgcgttggcgacatggtgatggccaccgtgaagaaggggaaacccgatctgaggaagaaggttttgccagctgtcattgttcgccagcgcaagccatggcg

SEQ ID NO: 13009 - DNA, 255 bp, Glycine max
  unsure at all n locations
  Clone ID: 701066525H1
cggctcgagcggctcgaggtgagagagaacactccttgagctccacacatcataggacttttcaactgaaaacacttctagcctaaagccttgctaataaacacactcatggcctcccaatttgctagggatgtaaaatgcaagagctaatgcactgtgcagcctcttatggagaaagaggaagccattagttcactgtactcgtcgccaaaactatgcgataccatnccaatgccaacccgaaagacagagaac

SEQ ID NO: 13010 - DNA, 268 bp, Glycine max
  Clone ID: 701066526H1
ctcaaattcctgtcctgaagatgacagcaaagtggtatctcattgtgtgtgttgtagcgatctgggccgttgatctgggttcatcatcacaccatgcccgtgccccagcaccagcaccgtcagtggagtgttcaaacctggtattaccttatcggattgcctcaccttcgttagcaacggcagcaccgtcaccaagccacagggaacatgctgctcttccttgaaaactgtgctcaacacagcccctaagtgcctttgcgaggctttc

SEQ ID NO: 13011 - DNA, 237 bp, Glycine max
  Clone ID: 701066527H1
ctgctcgaggttcatttagaagtgaataatcttcctacaaattcttctacttgctaaatgaagaactaattgaatgtattttatactgcaagatattaaatgtacttacattttcatttagttcttttattgggcaaaaaaaaaaaaaaaaaaaaaaaaaaaaactcaaaaaaaaaaaaaaaaaaaaaaaaaaaaaaaaaaaaaaaaaaaaaaaaacacaaaaaaaaaaaaagaaaa

SEQ ID NO: 13012 - DNA, 269 bp, Glycine max
  Clone ID: 701066528H1
cttggacaccggcatcacactgcggaagacgagaatgtctccaaagctcccttcacatctcttcccgtggctcatcctactaacattcgcatctttctatttcttctcttctttcctctctctcagcacattctcctcctcccatcatcttcatcaccaacctcacaatctctctcaatctccaacatctgtaacctcttcagaggccactgggtctcggatcccaaccacacccctctctacgaccaaacttgccccttccaccgaaa

SEQ ID NO: 13013 - DNA, 268 bp, Glycine max
  Clone ID: 701066529H1
gtacgatgaaatgaaatggagttcccagacacgcgtttgtctctgagatcgagcttgacgttcggagagacgctgtgctcggtgttcattccgctcataggaatagtcgaagctttggttttcacattcgccagttgcttcgattccaatctcccaagaagaataagatacattcttctaccttcgatgacattctcaccctcgccgaggattctccatgttcgttttgctttttctttttctctttcatttcatttttcgctgtttt

SEQ ID NO: 13014 - DNA, 144 bp, Glycine max
  Clone ID: 701066531H1
cgactcgtctgatttgggaatgggatttggctatgagtgtgatacgaccgaatacgctgcgtttggtggacttttcgatcattcggatttgtattatgactcgtggcggcacgagaccttgccaacacaatagaagatttactg

SEQ ID NO: 13015 - DNA, 224 bp, Glycine max
  Clone ID: 701066532H1
cacgcgtacgttcggacttcggcccgagctagatgtcgaagagaggacgcggtggttcggcggggaacaagttccggatgtcgctgggtctgccggtggcggcgacggtgaactgcgccgacaatacgggggcgaagaacctctacatcatatcggtgaaagggatcaaagggcgttgaaccgtctcccctcggtttgcgttggcacattggtaatggccactg

SEQ ID NO: 13016 - DNA, 273 bp, Glycine max
  Clone ID: 701066533H1
gcgatttctaagcagaagaaggacaagaacaaaaaacatgtagcatgccataaaagcaggagctcttgttccttgtcatctagaaagaaatactgtagatctgggttagcaatggctcctggaagcagtgttttcaaagaagttcttaatctcacctgatgtcttcagattatgaaatgggaaaagctaaatctgaggccaagagtaacagtacatctacaaaatctagcattgggttgagtggaaagagtggaattagttcaaacaatggcg

SEQ ID NO: 13017 - DNA, 268 bp, Glycine max
  Clone ID: 701066534H1
tgtggccgttcagtgacaccgagtgtaaagaagaggagagaaaccgagaaagaagaagaaaactagggttttgcaattgctgcaatggcgcatcaaggagaaccggcgaactgcggtggggtgagctcgaggaggacgacggcgagatctggacttcctcctgccgccgcggcaggtgataggccccgacgagaacgggataaagaaggtgatcgagtacaagttcgacgaggacgggaacaaggtgaagatcaccaccaccacgcgc

SEQ ID NO: 13018 - DNA, 267 bp, Glycine max
  Clone ID: 701066535H1
gtcttcaaaaaccctaatgtgctcttccttgagcatccagcagcaacaaacaagaggggtttgccttgtgccgtttgtgctgttttcgggacgaagaagaagatggtgtcaggttctggaatctgcgcaaagcgggtggtggtgacgcgcgccaccacatgctgggtcgtctagcctccatcgtggcgaaggagcttctgaacggccagaaagtggtggtcgttcgctgtgaagagatttgcatctcgggcgggctggtgaggcaga

SEQ ID NO: 13019 - DNA, 265 bp, Glycine max
  Clone ID: 701066536H1
catttttctgtcactacccactcctttctctgtctccatcgtttcgcattgcacaagcactctctctttcccttaccctttttcaggtttcaacgctccaactatccatggcaaaccgctggctcagacccgaggtgtatccatgttcgctgcggttggtgctgctgttgggatctgtggattccaactggttcgtaatatctgcatcaaccctgaagtcagggtgaacaaggagggaaggaaggcaggagttttggagaacttt

SEQ ID NO: 13020 - DNA, 263 bp, Glycine max
  Clone ID: 701066537H1
cgggtttggatcctgagtataataggttgttcaatgagggcatggtgtgcactgctagggttgtgtccaaggctgtgatcactggctacaaagatgggttcaaccagattaagtccttggttgatgttggaggtggcattgagggtctctttcggagattgttagggcttatcctcatatcaatgccatcaactttgacttgcctcatgtggttgccactgctcctaagttcgatgggatcacccatgttggaggtgacatgt

SEQ ID NO: 13021 - DNA, 260 bp, Glycine max
  Clone ID: 701066538H1
ctgcaattcactcaccctcttcaccacctctttaagctcaagctatctaagaattgttattacttctttctttgcaagtttacatctttttgtgtgtgagaaaaatggcatgcattagcaagagcagagcaatgttcttcttatggctttctttgtggggcttctatttgctgcaggggtgagtgctcagaccagtgagttccctcaagcgccagcaccagcaccaacaatggacgctggagctggatttttggtgactc

SEQ ID NO: 13022 - DNA, 258 bp, Glycine max
  Clone ID: 701066539H1
cgcgtgcagccttccacattctttctcgttttcgatctctctcgatttttccttcccttttctcaataaacgaggtgcttcagatttgctcatactaggagggaatcgaatcgaatcgaatcgaaaggaaagtgcagactggtgacatgccgttgccggcgctctttgagcaagcccgcaagatccacgacgcagccaccgattcaggcgccgaccaggaggttgtgcagaaggggtgcgatgctctgcatagatgcg

SEQ ID NO: 13023 - DNA, 264 bp, Glycine max
  Clone ID: 701066540H1
ttctgaataaactaaggcagaaacatgcgctcccttctggtgaggggggaccatatggggtggacatagccactggtggaattgctgactcgtttgctaactttgtctgggagcctgcaattgtgaagatcaatgctataaagctgcaacagaggctgcttgccttatcttaagtgtggatgaaacaattaaaaatcccaagtctgagagtgcacaaggagatgctgctgcaagtgccatgggcagacgtcgtggaggtgcatt

SEQ ID NO: 13024 - DNA, 263 bp, Glycine max
  Clone ID: 701066541H1
cctagagagtttgaggaagaaatcatcatggcttcagcagcatctgggtttgtgctgtctcttcatgttgcagcttccaccacaaactcaagggtggtcttgttcaacacaaagaacaacgcttctagacttcttgtgaggtgttagatgagcctgcagcggcggcacctgccaccgccacacccccagctgcagctgaagccaaaccaaaaccaccaccaattggtcccaagagaggtgctaaggtgaagattcttaggaag

SEQ ID NO: 13025 - DNA, 164 bp, Glycine max
  Clone ID: 701066542H1
ctcgagccgggaagaggaagagggatacatggatagggagattggacgttagtagtagtgggtcttgtttcctcatgttaatatgtgcctcatttacaatgttgcacaatgctcagcagttcctttccttgtgaaatgtaatggctatctatctgtttttcttc

SEQ ID NO: 13026 - DNA, 265 bp, Glycine max
  Clone ID: 701066543H1
ctaacaccacctaaccagctcgtgattcttcccgccgtagatctgttccttttcgccgttcctccatggccgacgacttcgaattctccgacaaagtccctccttccttcgatcgcgtgggttcaaaagggttcaacccagcttaattgttctccttcttgttggtgggttgctgttgatattcctcgttggaaattatgtactatacacatatgcacagaagaccctccctcctagaaaaaaaaagccaatctcaaagaagaag

SEQ ID NO: 13027 - DNA, 259 bp, Glycine max
  Clone ID: 701066544H1
ctagaaggatctgatgagatctttggagggtatttgtacttccacaaggcacccaacaaggaggagttccacagagaaacatgccgcaagatcaaagcacttcaccaatatgactgcttgcgagccaatcaatcaacatttcttggggtctagaagcccgtgtaccatttttggacaaggcgtttatcaatgctgcaatgagtattgaccctgagtggaagatgataacaagagatgaaggacgaattgagaagtggat

SEQ ID NO: 13028 - DNA, 246 bp, Glycine max
  Clone ID: 701066545H1
tttaaattaagatggattaagatgtcttattttccattttaatttaaattacttcaaaaattgaaagacagaaaagacatcttaatccatcttattttttctttctttattttccaactaaataaggtaaaattttaaaagaatctaaaaatcttttcttttcacttttttcaaccaaatacactaaaaaaaggaaaaaaggggaaaattgtttaagtattattccaggaccttttttttaatttt

SEQ ID NO: 13029 - DNA, 157 bp, Glycine max
  Clone ID: 701066546H1
gtgagagacatggcttccttaagctccttagtgctgctccttgcagctctaattctatcccctcaagttcttgcaaactatgagagtcccccagtgtacaagcctcccactgagaaaccaccagtttataagccgccagacggaagcctcctgttta

SEQ ID NO: 13030 - DNA, 203 bp, Glycine max
  Clone ID: 701066548H1
ctattgcagtgggagatgtcattccagacggcattttggcttacttggatgaagataacaaaccccaaactgtctctattcactctctcgccgccggcaagaaagtcatcatctttggggttcccggtgccttcactcctacatgagcttgaagcacgtgcctggcttcattgagagagcagaagagctgaaaggaaagggta

SEQ ID NO: 13031 - DNA, 272 bp, Glycine max
  Clone ID: 701066549H1
tgcgggttgtttgttgttccaattcaggcgtgagtgttttccctagttgtcttagattccctccactgatcgcaatttcaacaacaccctcttcgatccgctttctaaattctccacccctccgttccactgcttcgtcgcaacacttacaataatggcttcgaagaattctcaacaagacacgcgcttagcgagaatcgcctctgcaatccgagtcatccccgactttcctaagccaggaattttgtttcaggacataaccacgctgcttc

SEQ ID NO: 13032 - DNA, 263 bp, Glycine max
  Clone ID: 701066551H1
cttctctagtgttttcacagaaacaaccaccccaccatggtggaaactcctccaaaatgcaaactcacattcacattaatcttctgcatcgttatctcccactctcttggcttagtttccttcaccttgtgcatagcctccgagctaagaggaacaaggtgcatgatgtctacactactttaatttattaagactctgcagttaggattttctgaattatgatgctttaatttgtttgttttgtagaagggggatctcagatg

SEQ ID NO: 13033 - DNA, 265 bp, Glycine max
  Clone ID: 701066552H1
ctttttgttgaaagaagagaagcaacaaatcaatctcacacttagtgttgttacgatggaatcaccgttcaaaccagagattctgaaggggaaggttgctctaatcactggtggagcctccggaatcggattcgaaatttccaccaattcggtaaacatggagcctctgttgcgctcatgggtcgccgcaaacaagtccttcagtccgctgtctccgttctccaatccctcgtcattcccgctgttgggtttgagggggatgtac

SEQ ID NO: 13034 - DNA, 264 bp, Glycine max
  Clone ID: 701066553H1
gtgaaagtgagataaaataaaaatcaaagagcataatgtcagggatcattcacaagattggggagaccttcatgtgggagggcacaagaaggaggaggagcataagggtgagcaccatgctggagaatacaaaggggagcacatggtgaacacagtagtgagtacaaaggagagcatcatggtgaacacaaagctggagagtaccatggtgagcacacgccagagcacaaagaggggttcctagacaaagtcaaggacaagatc

SEQ ID NO: 13035 - DNA, 264 bp, Glycine max
  Clone ID: 701066554H1
gtatgaatagacaggcaaatgatttagaccttctaaagtaatgtgacaaagcacaatactagtggaatttagagtctctttttgggagggggtggggaggcaagagagaattgggaattttccctcaatatctcaatgaagttaaaaaatttgtcctatcttcagctttccttttcatgttgatatatttggtcaataatgtcgatgccagtccagtgtgtgtgtgtgtgtgttttttttttttttgggaaaaaaaacaaaagg

SEQ ID NO: 13036 - DNA, 264 bp, Glycine max
  Clone ID: 701066555H1
gtagaacttaagggatggggatactcaaacagtgacgtgcgtggatatcttagtgctctatccattttgcaggattactacccagagagattggggaagttgtttattgtgaacgcaccatacatctttatgaaagtgtggaaattgtttacccattcattgacaacaaaaccaagaaaaagatagtatttgtggagaaaaataaggtgaaatcaacactgctagaagagatggaggaaagtcaggtcccagagatattcggtg

SEQ ID NO: 13037 - DNA, 260 bp, Glycine max
  Clone ID: 701066556H1
gggagctggatggaattcaagtagagttgcaagcaactgatcctactgagatgggtcttgatgtgttcaaaagccgtgccaactaaaatgattatataaaatagtaggctttctggtgggagcagcacccctgaagccttagtactcatatggaaaatatcctagtttgtgggatggtcaacttgggtagttatggtcccaaactctcaattttccaagttgtggcataaaattctattgcaccttttgacaagctttgc

SEQ ID NO: 13038 - DNA, 265 bp, Glycine max
  Clone ID: 701066557H1
ctgcagcagtaggcaaaaatgtcgagttccatgatgacgctctcaaggaggctctcctgctctctgcttcgaacccccaatgcatatcgccacttctccaccgatcaccttttcgactcggacgaggacgactcagcacccgcccacccgcacccgacgccgttcaagaagaagaaaagttcgtcatcgatcgccccctcgagaatggcctcgacgttggcatctacagggctattctggtagggaaggcggggcaggctccttt

SEQ ID NO: 13039 - DNA, 264 bp, Glycine max
  Clone ID: 701066558H1
ctagaaaagaccatcaaagtttcacttcagccttatccggtttagggtttcggtttttgacccaacctttgacgtatcgaaaccttaagtttcggatcaggtctgagcaatctggttggtagaacctttggtcttagagagtaagttttatgtctgaattagacgatcaaattcctactgccttcgatccttttgctgatgcaaatgctgatgactcgggtgctgggtcaaaggagtatgtgcatattcgcgtacagcagcgaa

SEQ ID NO: 13040 - DNA, 263 bp, Glycine max
  Clone ID: 701066559H1
tgaccttcggtttggtgtacacagtctacgccactgccgttgaccccaagaagggcaatttgggaattattgctcccatcgccattggtttcattgttggcgctaacattttgttgggtggggccttctccggagcagccagaaccctgctgtgacatttgggcctgctgtcgtgagctggacctggaccaaccactggatctactgggccggccctctcatcggaggtggaattgctgggcttatctacgaggttgtcttca

SEQ ID NO: 13041 - DNA, 264 bp, Glycine max
  Clone ID: 701066560H1
ctgtttgttgtgagctataagctagtttatcgtgaggtgaatatgaagttgtttgttctctttgttgctgcagtagttttggtagcatggccatgccatggcgcaggctaccaaaggttccctctccgaatgaacactggtatggtgagcgttcttcggaggtaaaatgcgcaagttttaggcttgctgtggaagcacacaacatccgaacctttaaaaccattcctgaagagtgcgttgaaccaacaacggactacattaatg

SEQ ID NO: 13042 - DNA, 261 bp, Glycine max
  Clone ID: 701066561H1
ctaaattctctgtctctctctctctctctcgatcaatcatggctttccccaatcagcacaccgtcgattaccctagtttcaaactcgtcatcgtcggtgacggtggtacaggaaagacaacgttcgtgaaaaggcatcttacggtgaatttgagcagagatacgaaccgaccattggagtggaggttcacccattggatttcttcacaaactgtggaaagattcgcttctactgttgggatactgccggacaagagaagtt

SEQ ID NO: 13043 - DNA, 264 bp, Glycine max
  Clone ID: 701066562H1
ggttcagaggaaatggaagctgttatcatcattgatattctgcgaagagcaaaggcaaaggttgtggttgcttctgttgaggataaactagagattgtggcatcacgcaaagttaaactggaggcagacatgctccttgatgagcagccaaactttcatatgaccttattgtgttacctcggaggacttggtggtgcccaaacttttgcaaactcagaaaccttggtgagtttgctgaaaaagcaaagagaatcaaacatatat

SEQ ID NO: 13044 - DNA, 268 bp, Glycine max
  Clone ID: 701066563H1
caggcagatacttgttacatagttaaagttcaaattcaagacatcttaagacgatacaacaccagagccatgggcgtttgtatcaacgaaggataaagaacgcattcgacaagaaggtacgcccgtgcaagttcaacgacgggacctcgtgctgaagaaaatgtcccatgttgttaaagataatcgaggcaagtgggccccgaattatgaaggacctttcgtggtgaaaagagctttttctgggggtgctctgatactcacccacatg

SEQ ID NO: 13045 - DNA, 164 bp, Glycine max
  Clone ID: 701066564H1
cggtcattcggttcgagctagctgtcgaagagcagactgtcgcgtttgtcgcattccatacgacgccgaagcgaagagtgtttgtagggcttgcgttgcgcatcgtttgagagagagagatgggaagagacaaagagacaacaaaggtagcttacgcagtggag

SEQ ID NO: 13046 - DNA, 275 bp, Glycine max
  Clone ID: 701066565H1
ctccttcgtgctcaatgaatttcgagtccaaggcagacgccggtgcctccaaaacctaccctcagcaagccggtaccattcgcaagaacggctacatcgtcatcaaaggacgcacctgcaaggttgtggaagtctcgacttccaaaactggaaagcacggtcacgccaagtgccactttgttggaattgatattttcactgccaagatacttgaggatattgtgccctcttcccaccaatgtgatgttcctcatgtgaatcgtactgattaccag

SEQ ID NO: 13047 - DNA, 265 bp, Glycine max
  Clone ID: 701066566H1
ctttgtaatgtttctgcagatggaatctgttaaaccatcagcagtgacgccaagcaagagcaaattggctcgcacttttgccaaagttcttcacgttagagcagtgaccggaattgcaccacttgatggactgaagaatgttaagtcgatgcggatctcaacaatgaagcaaataaatcgcaagagtgcactaaacaatgaagaagacgaagagcttcaggatagacaggccacagaagctttgcttgcaaacccttttgctagc

SEQ ID NO: 13048 - DNA, 254 bp, Glycine max
  Clone ID: 701066567H1
cttcctcttaagcttgctactgagtttccacactgcataccttacgtcttccgaattcgaagttaatttgcaagatggctaaggcaaaggctcagatcaacattgttgtggttggtcatgtggaccctgaggaggcaaccccattaacgagctgaagaagcctgttgtggagaaagaagctccaggtgctgccatatgagggcatgcacgtacggcctcggaggggaacccgaaaattatgttaacaaaataat

SEQ ID NO: 13049 - DNA, 261 bp, Glycine max
  Clone ID: 701066568H1
ctctctgcattattctcttcccttttctatctccctctgcaaaaacgaagtaaatgggtcggcttaatctcctacttgtgtggtcactctctttaacacttttccttaattatctacacccaacctctgcccagctcagccaaaccactatgctaacatatgccccaaccttgaaagcatcgttagacaagccgttactaataagttccaacaaacctttgtcaccgtcccagccacccttcgcctattctttcacgattg

SEQ ID NO: 13050 - DNA, 259 bp, Glycine max
  Clone ID: 701066570H1
ctaacggagaaggtcaatggcagagtctgtgggtgtggctgggttcggtgtttcaggctcattctctcttactaggcccacaatcttttctcgatcttccaataatatctctctctttcgctctcaatctcatttcccgctgctgcattcggttccttgacacgttccaacccacacgtgcacgccgctgtcacttccgactccaaggccgctacttcgcttgacctaactcaacccgatctcgataatagcggcggcg

SEQ ID NO: 13051 - DNA, 261 bp, Glycine max
  Clone ID: 701066571H1
cgataagaagaaaaggtacctagactctgaagattctgagttggagaaagtgattgacttttatattagttctgagagtgatgttttcgtaccggcaatatcaggtctattttatgcaaatgtagctggtaagagaatcgctcgggtaaatcccagatactggttccggccaatattccaacttcatctgcttctgcctccagtttcttgtcccattatgtctccaagaaaaaccacttcgcctattcttgttactgttag

SEQ ID NO: 13052 - DNA, 263 bp, Glycine max
  Clone ID: 701066573H1
gcaattcaaggtttgaacttcccatggcgagcgctgttgatgcttccggaaatccgatcccaacttctgcggtgttgatggcgtcgtcgaagcacattgggataaggtgccactccgagaatttggagtttctgaagtgaagaagaaggatcagaaccccgaaaagtgcctcgataagggtcgtgatgttacccgttgtgtccttggccttctgaaggatctgcaccaaaagtgcacaaaggagatggatgaatatgttggct

SEQ ID NO: 13053 - DNA, 264 bp, Glycine max
  Clone ID: 701066574H1
caaacgttaactgatactcctgatatcagaaaaagaaaaaagaaaaacatgtctctagtgactgcagagatcaaagccaaagcagaggtgtatcatggagatgcactctgccaagagaagtcaaagttgctgctaaaggagtagggctacctaatgggcttttgccattgaaggacattgaggacatgtgggtatgagagggatagtgggtttgtgtggctgaagcagaagaagagcacaaaccacaagtttgagcagcttggg

SEQ ID NO: 13054 - DNA, 260 bp, Glycine max
  Clone ID: 701066575H1
ggctcgaggtttggttcaacaagaggaattctcccaaattttgtatttttcacccaaatttttccacaaaacctaacccttctcttgtttcacgcgcaatccgaatctccatttctatcttgtcctaggacgagcttgtaatacgccatggcagccgtgtccgatcaagacactagtgtatgcactcactgtgatcgggctattccttcggcaaatattgatttgcattttgttcattgctctcgaaaccttgaaagatg

SEQ ID NO: 13055 - DNA, 261 bp, Glycine max
  Clone ID: 701066576H1
gtcagatatgcttgtacaatttgaaaaggtcaagcatgtctggtggctttaacttggtgccttcattgaatccggatctacttctgtagcatatataattatacacgctcatttgtcaagtattagactgaatcagttatagttttcaagtgtagtcaaggatgagatctgctgcaaacttcttattgttcattactgctccttgcaagaacagatgttctttcctgtgacattcatttgctgaaactttattctgctatt

SEQ ID NO: 13056 - DNA, 263 bp, Glycine max
  Clone ID: 701066577H1
tgcagagtactacagaattattaatggcctgaatttcgaagataaacttcatccaggtggtccatttgacacattggggcatgcaaatgatccagaccaagctgcactgctaaaggtgaaggagattaaaaatggaagcttgctatgtttgccatgcatggtttctacttccaagcttatgtcactggagaaggtcctgttgagaaccttgcacaaacatctcagtgacccttttggcaacaacttgctcactgacatttctg

SEQ ID NO: 13057 - DNA, 257 bp, Glycine max
  Clone ID: 701066578H1
ctgatttcttctgtagaaggccagtatagtgggtttttactccggttttgtcttccaataaattgattttaagatttttaactgcagttttgcttggttatttgttgggaagttcacggatctgagtttatcttttgatgttctcggtttatactggagatctcagatctctgattatgatgtatttgttgccccgatttagtatctctgttatttcaaaattgtgagaatacattaaattcaagtaaactagagaa

SEQ ID NO: 13058 - DNA, 260 bp, Glycine max
  Clone ID: 701066579H1
gagaaagaaaaacccaacgaccccttttgccatttcctgcaaaacccgtttctcttcttcaattcgcgcgtccatggcttcaccctccatcacagacgccgaaacaaagccgttttctgttctcttcgtgtgcctcggcacatctgcagaagccccgctgctgaaggagtcttcactgacttagtcaacaaaagggacctcaattcgaagttcaaaatcgactctgctggccacatcaattaccacgagggaaatgaagc

SEQ ID NO: 13059 - DNA, 233 bp, Glycine max
  Clone ID: 701066580H1
gttgatatagaaaggtaggataaaccagtggccaaggaatatatggcgttttctatggttttcattgttagcaacattatgctgcttttcagttcagcatttgccaaaactgctagtcctccctctctgagcccaactccacaccagccccggcacccgactacgtgaacctcaccgatttgccagttgttgcgggtccatttcaaaccttccttggataccttgagtccacc

SEQ ID NO: 13060 - DNA, 279 bp, Glycine max
  Clone ID: 701066581H1
ttcggctcgagcacaaatctgactgtttgcacttcacttcgtttcattctctcaaacaccaaacccaagtgcttatgtgttccttcaaaacatggttcaatttgttcatcattttccttgcctcggctgcaacacccatcttctcattaacagatccccaaatcaactctccacaaactttctagaaattgccaagaaacctgaagtatttgattggatggtgaaaatcagaaggaagattcatgagaatccagaattgggttatgaggaatttgagac

SEQ ID NO: 13061 - DNA, 262 bp, Glycine max
  Clone ID: 701066582H1
ctaaaaaaatccaaaaaaagaaaaacaaaacgcttaacgcaatacaaaaaccacagtttcaatcacatctctctctctctttctcgcaaatttctactttctgggttttctatttgagattcgttgttccaatgagcgatcactggtggtgttcgttgaccgtctcgcgcgccctgtctccgttgacccggtggcgcagcgccttccgagccgtctcctcctccggcccccgtgaatgctgacgcttacgggagctccggca

SEQ ID NO: 13062 - DNA, 262 bp, Glycine max
  Clone ID: 701066583H1
ctttgcgcagttccctacctctcctttcaagatgcagatcttcgtcacagaccctcaccggaaagaccatcacccttgacgtggacagctctgacaccatcgacaacgtcaaggccacgatccaggacaaggaacgaattccccggatcagcaacgtctcatcttcgccggaaagcagctctaggacggccgtaccctcgtcgactacaacatccagtacgggttaaccctgcaccttgtgcttcatctacgtggtggtatg

SEQ ID NO: 13063 - DNA, 260 bp, Glycine max
  Clone ID: 701066584H1
cttccacggcagtgtttctctttctctccctctctatcttcaatttcgagaagtagctccagtattatatggcgtccttcagagcattctggaacagtccagttggtcccaaaacaactcacttttggggacctattgcaactggggatttgtagcagctggattggctgacctgaacaaacctccagaaatgatctctggcaacatgacaggagcaatgtgtgtctattcagcattgttcatgagatttgcatggatgg

SEQ ID NO: 13064 - DNA, 255 bp, Glycine max
  Clone ID: 701066585H1
gtggctttgaaaatactatagtattaactgtttgaaaaatcatcaatctgatggcaacacggaagtatatcagtcctttaacagcgagttgatgattatgcatcatcagtaaaaaaaaaaaaaaaaaaaaaaaaaaaaaaaaaaaaaaaaaaaaaaaaaaaaaaaaaaaaaaaaaaaaaaaaagagaaaaaaagaaaaacggaaaaaaaaagaaaaggaaaggagaagaagagagggacagaacgaaaggggaaa

SEQ ID NO: 13065 - DNA, 261 bp, Glycine max
  Clone ID: 701066586H1
cgcagtatatcgtacataacggcgtcgcagcttctctctctcagacgccatccaagcatcgccgtcgtcgatgtaagggacgatgagaggagctacgacggacacatatcggggtctcttcattacgcaagcgacacttctccgataacatctcaaatctcattcaggcagttaaaggcaaagacactctcgtcttccactgcgctctaagtcaggttcgtggcccaacttgtgctaggaggcttgtcaattatcttgagg

SEQ ID NO: 13066 - DNA, 261 bp, Glycine max
  Clone ID: 701066587H1
gccttcatgtctttgattaaagaccctgatgaaagacgtctagagcagtgggagacaactgttcaagcacaaagaggctggaattttgctaacttgcttggatttggtgacttaggtggacctccattgtctgccgctgagaatattctgtgcactctagatatctttcaaaagcaaaatccttaaatttgtctgaaattgcagagatgaaagttgtctatcgtggacgggtagacattgagggtcgtcctgtcatggttg

SEQ ID NO: 13067 - DNA, 71 bp, Glycine max
  Clone ID: 701066588H1
ttttttttaagcaacgcgacggtcagaaaccgaaattactggttactataataatggtaattgtgcttttt

SEQ ID NO: 13068 - DNA, 260 bp, Glycine max
  Clone ID: 701066589H1
ggcttgttcagtctttcttggaactttgttactctcacacatgtctcgctccgtgcctttggtttcaaccatttttgtcttgcttctgcttctggtggccactgagatgatggggccaacaatggtggcagaagcaagacttgtgagtctcagagccaccgtttcaaggggccatgtttgagtgacaccaactgtggctctgtttgccgaaccgaacgtttcactggaggacactgccgtggcttccgtcgcagatgctt

SEQ ID NO: 13069 - DNA, 261 bp, Glycine max
  Clone ID: 701066590H1
ctctaccctactattatccctttccttcctgcctctctttgctttcctggctctttcagaagatgttgaacaagttgtggacataagtggcaaccccattttcccaggtggcacatattacattatgccatcaacttgggcgctgccggtggtggattgaaactaggccggacaggaaactcaaactgcccagttactgttttgcaagattactcagaaatcttccgtggcacaccagtcaaattcagcatacctgggata

SEQ ID NO: 13070 - DNA, 262 bp, Glycine max
  Clone ID: 701066591H1
ctgcaaaaaccattctccttcggtgctcttgaaaacatgggaaaacagagcacagaattctctgccctcaactgcatcgacctctccaaccctgacatcaaccaatccgtcaatttactcaaacaggcatgtttggattcggttttttctacgttgtcaatcatggaataagccaggaattcatggaagaggtttttgcacagagcaagaaattcttctctcttcctcacaaggagaagatgaagattctcaggaatgaaaa

SEQ ID NO: 13071 - DNA, 262 bp, Glycine max
  Clone ID: 701066592H1
gtgaagtactcaagggagcctgacaatccaactaagtcttgcaaggctagaggcgccgaccttagggttcattttaagaacacaagggaaactgcctttgcaatcaggaagttgcccttggtcaaggctaaaaggtactggaagatgttcttgcccacaagcaggcaattccattcagacgtttttgtcgaggtgttggaaggacagcccaggctaagaatagacactctaatggccaaggacggtggcctgtcaagtcagc

SEQ ID NO: 13072 - DNA, 263 bp, Glycine max
  Clone ID: 701066593H1
cttaatttctctctgtctcgtttacacatctctccaacctttcactctcgtttctcagttttattcgaatccctctctcaatctcctttccaaatggccagcgttgcggttgcacagcaaacaccaacaacagttccaaaaatgaaacaaccgaggtaagcaagacccaggaaacaaccccagtcactgaggctcctgcaacagaacaaccagcagctgaggttcctgcaacagaacaaccagccgctgaggctcctgcccca

SEQ ID NO: 13073 - DNA, 256 bp, Glycine max
  Clone ID: 701066594H1
cttcctcttccttcttcttgtttcatcttccactgcttgtgatcgtccctgcaccaatccaaggcttcctatttctccaaagcttctgctctttcatctggggcatgtgggtatggctctttggcactagacataagtgtggacaccttgcagctggtgtggcttctctcttcaaagatggagcagtttgtggtgcctgctttcagataagatgcaagaacccaactctatgcagtaaagaaggtacagagtggta

SEQ ID NO: 13074 - DNA, 265 bp, Glycine max
  Clone ID: 701066596H1
ctagaaagttagaaaacatggcagcggtggccggagcatcctcgtccgtgattaaggtggctgcactttccggatctttaaggaaaggctcttacaacagagccctcattcgttctgctattgagctaagccaaggtagagtgaaggccttcaaatcgagtacgttgatatttcgcctttgccccttctcaaaacggttcctgaggtgattgggacctaccccccacaagttgaagcctttcgcacaaagattctcgcagctgat

SEQ ID NO: 13075 - DNA, 242 bp, Glycine max
  Clone ID: 701066601H1
cggagttgactcggggtgagttgactcagcgatggcggaagaggtgactcgggtgatggtggcagtgaacgagtcgagcatgaagggataccctcatccttcgatcagcagcaaaggggctttcgaatggccccatcaacaagatcgtcgcaacaacgtctctgccttcaaccttctttttcttcacgttcaagtccccgatgaagatggttttacatgacatgcatagtatgtacgcatcg

SEQ ID NO: 13076 - DNA, 274 bp, Glycine max
  Clone ID: 701066602H1
ggaagacagctcatgaatcttcttcttcttggtgccatttcactccccactgctggaatgcttattccctacacctacttctttgtccctccaggttcaggttcttcagctggcggtactgttgccaaggatgccgttggaatgatgtaatctgccgagaattggctcaaggcacatggacctggtgaccgaacccttacacaaggattgaagggagatcctacctatcttgttgtggagaaagacagaacccttgcaacatttgccattaatg

SEQ ID NO: 13077 - DNA, 275 bp, Glycine max
  Clone ID: 701066603H1
gtcactcactgcagatctcaattgcatcgctgtccatggctaccatcgttagcatcaaggcccgccagatccttcgacagtcgtggcaatccaactgtcgaggtggatttgacttgctccgatggtacttttgccagagctgcgttccaagtggtgcatccactgggatttatgaggcccttgaattgagagatggaggatctgactaccttggaaagggtgtatcaacggctgttgacaatgtgaacaccgtcattggccctgctttgcattgg

SEQ ID NO: 13078 - DNA, 270 bp, Glycine max
  Clone ID: 701066604H1
caggcagttatccattcacatttcacagttagcacttagcagactctgctgcagtgaggtgaggggaggtttgtttgttgtttcgtttttcctttcctttccgccagaatccgttgagaatggcgttgccggtagtcgtcgagcagagtacctcaaggaggtcgacaaggctcgccgcgatctccgcgcactcatcgctaacaggaactgcgctcctctcatgctccgattagcctggcacgatgccggaacttacgatgctaagaccaa

SEQ ID NO: 13079 - DNA, 271 bp, Glycine max
  Clone ID: 701066605H1
ctgtttagctccttcaccattggaaattgtgaatcccaaggcttcaaggatttcatgacatgcgcagcaagttgatggatcttttgaacagctccgactatgtcccgacctatgaagacagggctggcgactggatgcttgtcgtgatgtgccatgggagctgtttgttgaatcatgcaagcgtttacgtatcatgaacggaaaggacagctattggactggcaccaagagccgtggagaaatgcaagaacaggagctagactagtagtta

SEQ ID NO: 13080 - DNA, 268 bp, Glycine max
  Clone ID: 701066606H1
gtattcgataacacctatcaggctacaattggtattgattttctatcaaaaactatgtatcttgacgatcgaactgttcgactgcagttgtgggatacagctgggcaggaaagatttagaagtcttattccaagctacatagggactcatctgtagctgttcattgtatatgcatgttgcaagccggcagactttcttaaatactgctaagtggattcaagaggtgcgaccagaaagaggcagtgatgtcattcattgttcttgttgg

SEQ ID NO: 13081 - DNA, 265 bp, Glycine max
  Clone ID: 701066608H1
ctgtagcccaagccctatacaaccaaaccctaacacacacccatttgattcagtttccatggctagcctcaaggttgcatttttggctgcagtgctctgcatggttgtggtgagtgcacccatggcacatgcagctatcacggcgggcaggtgacgaatagcctgatcaattgcatcggttacctccagaacggaggaacgccgccgtcgggatgctgcaacggagtgaagagcctcaatgccgccgccaagaccaccgccgacc

SEQ ID NO: 13082 - DNA, 271 bp, Glycine max
  Clone ID: 701066609H1
cgcaacccttcagcaaccatgtcgaggagaaaggttagggagccaaaggaggaaaatgtcactcttggtccagccgttagagacggtgaacatgttttcggcgtggctcgcatctttgcctccttcaacgacaccttcatcatgtcactgatttgtctgggcgggaaacccttgttcgcatcactggtgggatgaaagttaaagctgacagagatgaatcatctccacatgctgctatgcttgcagcacaggatgttgctgacagatgtaa

SEQ ID NO: 13083 - DNA, 267 bp, Glycine max
  Clone ID: 701066610H1
gtccatttctcactcgccgtcgtctcttccgtctagggtttctcctcttcacaaaaatggttgccgcaaaaaaaactaagaagacccatgagagcatcaacaacaggctcgctctcgtcatgaagagtggcaaattcacctcggttaccagaccgttctcaaatctcttaggagctccaaagggaaattgcattatcattgctaacaactgcccccctttgaggaagtcagagattgaatactatgctatgttggcacaggttgggg

SEQ ID NO: 13084 - DNA, 202 bp, Glycine max
  Clone ID: 701066611H1
ggaaccctaacacctaaaagccagaagaagcgaaatcgtaatcgcaatctagcggatatgaaggtcgtcgctgcatacttgctcgcagtgttgggagggcatccatctccttctgccgatgatatcaaaaacatcctcgggcagttggagctgaggctgagcatgagttgattgagttgctcttgacctgagtcaagggcaa

SEQ ID NO: 13085 - DNA, 132 bp, Glycine max
  Clone ID: 701066612H1
cgcgtcgccactgcaaattatgcttactcattgtggatgacctagtttctgttgatactcttattgaggaacatctcacagttgagcccatcaatgcatatgtccagagttctgacattgtggccttcaata

SEQ ID NO: 13086 - DNA, 132 bp, Glycine max
  Clone ID: 701066613H1
cggtccattgatttcttgcttctatatattacttgcttcttttcttgatcatgtcccttgctggtaaaatcagctctgaaattggtgttcaggcaaccgctgcacagtggttcaacctgttcacaacacaat

SEQ ID NO: 13087 - DNA, 268 bp, Glycine max
  Clone ID: 701066616H1
ttctcaactctccccgtcctctcaaaggaacaagaagaagaaccaaaattttattttgagaaaaacatggaggcattgaagatgaatcttttcttttttgtcatggcgctgctgatcatggcagcatcagctgcagattaccaggtccaagtcccacatcggatgctaccaccttattcgtgccaacagcggttgcttcactcgttgctcttgcttttgggatcctctcttgagttctcaacatgcagccaacacatattgtcttgtc

SEQ ID NO: 13088 - DNA, 275 bp, Glycine max
  Clone ID: 701066617H1
ctctagggaacaaaaaatgggatcctgcaaaccgacacatcggcattgacgtgaactcgatcaagtccgtcaaaacggcatcgtgggggttgtccaatggacaagtggcggagattctcgttacctataatgccgccacgagcctcttgttgcttctctgatccacacttcaaagaaaacaagttacatcctctctgacacagtgaacttgaagagtaatcttcccgaatgggcaagcgttgggttctctgccaccaccgggttgcatgaaggct

SEQ ID NO: 13089 - DNA, 272 bp, Glycine max
  Clone ID: 701066618H1
cggccaagtgaaagtgagagaaaataacaatcaaagagcataatgtcagggatcattcacaagattggggagacccttcatgtgggagggcacaagaaggaggaggagcataagggtgagcaccatgctggagaatacaaagggagcaccatggtgaacacagtagtgcgtacaaaggagagcatcatggtgaacgacaagctggagagtaccaaggttgagcaccgccagagcacaaagaggggttcctagacaaagtcttggacaagatc

SEQ ID NO: 13090 - DNA, 273 bp, Glycine max
  Clone ID: 701066619H1
cggccaaagtaagaggtatagtgttctaggagtgagcaacttgtgagcacatggcttccaaggctgcacttctcttgtgtctcaatgttctctttttcactgtggttagttccacatatgtgccatgtcatgcaccccccaaactcccaaacacccatctgtcccaaagccacgatccccaaagctcagcagctgccccacagacactattacgttcggtgtgtgtgctgctgtgttcggtttgattaatgtggcacttgggacgccaccaca

SEQ ID NO: 13091 - DNA, 263 bp, Glycine max
  Clone ID: 701066620H1
cggttgctactgagtttccacactgcataccttaggtcttccgaattcgaagttactttgcaccatggctaaggaaaaggctcagatcaacattgtggtggttggtcatgtggaccctgaggaggcaaccaccattaacgactgaagaagcctgttgtggagaaagaagctccagggcatgccatatgagggcatgcacgtacggcctcggaggggaaccagaacattatgttaacaaaataatctggaaccctatgtatcag

SEQ ID NO: 13092 - DNA, 265 bp, Glycine max
  Clone ID: 701066621H1
gtcaagcattgcatccctcttgatttgtagtttgttttgtgctttagataaaagttctgccaaatcaagaggggttttaagatcatagtgtgtgttttgcaacaatggctaagttctttgctgctatgatcttggcactcttgcacatttccatacttcaaacagtggtaatggctgctaatgaacaaggaggccacttgtatgacaacaagagcaactatggacgtggaagtgtcaagagttaccaatgcccatcacaatgctc

SEQ ID NO: 13093 - DNA, 252 bp, Glycine max
  Clone ID: 701066622H1
atcgaaaagcggtgggtggaagtggcgacgtggttggtggtctcttcacacattttgttggttggtttcaactaccgcgtgcactgacgtgtaacttttctactggctcccaagagaatatgaatagctccctctctggcatggtggttccacaacaatggcggcgcgtaacgaagattcctgcggaatccgcgtcaccggcatgcacttctcctacgacgtgcagcaaccgccgctcttcctcgacttcaa

SEQ ID NO: 13094 - DNA, 242 bp, Glycine max
  Clone ID: 701066623H1
cggtggtttcagtgcgtgatcggtgttcacttgatccttcataagtcgtcatcatcatcatcatcatcaccgttgattgaagaagatgccgatcagaaacatcgccatcggaaggcctgaagaggctactcaccccgacacgtgaaggcggggttggctgagttcatctaccaccttgatcttcgtgttcgccggttcatgttccgagcatggctacaacaagctcaccgacaacggccgcg

SEQ ID NO: 13095 - DNA, 213 bp, Glycine max
  Clone ID: 701066625H1
cggcaccacggaagaagaagaagaagaagccgaaaaagagaagaagtagtttggtgtgctaactgttcgagagcgcaatggacgactacacgagggaaatgatggacctgaagacactggtcactcgcactctcgagaagaaagcgtccttgccaggatccgtgccgaactcagagcgcagtgtgttcgacgccagcgcgaggaagatcatgt

SEQ ID NO: 13096 - DNA, 96 bp, Glycine max
  Clone ID: 701066626H1
ccggtcatttgagtagtagtgatggctagcctcaaggttgcatgtgtggttgctgtgatgtgcatggttgtggtggccatgagtgctgcacccatg

SEQ ID NO: 13097 - DNA, 96 bp, Glycine max
  Clone ID: 701066628H1
ggatcttgcacgtcctgatcttattgtgttcaagtgacagacaaatcagaacagggaagagagatttgaactgtaaatgccacgtgacagtgaaaa

SEQ ID NO: 13098 - DNA, 166 bp, Glycine max
  Clone ID: 701066629H1
cggtctggtttatagatctttgcgaaggaggtttacagcgctcaaccaaagatgcagaacgaggaaggacacagcactgagctttacattcctaggaagtgctccgccacaaacagattgattaccgctgaggaccatgctcggttcagatcaacttggggcatgt

SEQ ID NO: 13099 - DNA, 160 bp, Glycine max
  Clone ID: 701066631H1
cgtatcttcattttctctcttcctctcaccgagtcaccgactcgcctcccgtcgtacagactcagatcccccccgagtcacagtcagacagcatcatcgcccgatctgacgatgtctcgcgcctctatcgccgaatccggcggatcatgctgatcggggt

SEQ ID NO: 13100 - DNA, 273 bp, Glycine max
  Clone ID: 701066633H1
cgtgcgataagcaatagaattcagcgagagagagaaagagagtctcttgctctgtatctttgctttgatcattgccaatcttcaatttttctatatatccatcaatccgctgagtgcacagttctaatccttcgcctattgggtctactcctttctctcttcgtttccgctcgatccaattttcttcccatggctacgatcggacacaacaatctcaatgccaaattggttcttctcggggacatgggtgctgggaaatccagcctcgttttg

SEQ ID NO: 13101 - DNA, 138 bp, Glycine max
  Clone ID: 701066634H1
gagaaaacaaagggcggtggtgagtgcttctgcttcatcatcatcagagaatggcggctactgtgtcttctgcttggtcaaagcccggcgcgtgggcgctagattccgaggaacacgaagcccagctccttcaacaga

SEQ ID NO: 13102 - DNA, 271 bp, Glycine max
  Clone ID: 701066635H1
cggttcctttagcaaattccaattcccaatccaaaaccctaatttaggtcaaagaaccaattgtgatgggaccaaaggcagagaagaagccagcggagaagaagcccgcggaggagaagaagtcgacggtgggagacaaggtccggcggagaagaagccgacagcggcaaagaagcttcctaaggagggaggagccggcggagaaggggggaagaagaagaagaggaacacgaagagcgtggagacataccagatatacatattccaggtg

SEQ ID NO: 13103 - DNA, 259 bp, Glycine max
  Clone ID: 701066636H1
cggtttccttcccttccctaacgatctgaggtagccaccaagcttctctccacgcccttcttgggtaatctgaagtgcagcgatggcggatggattgcactcgcggcatccatcagtagttcagaagttatctggacagcttatttgttgtctaggcttgcccctactcactcaagacactattccacaactggtagttacttcaatggaggcttgcagtcttcgggtttggttccagtcatggcacattcatcggctg

SEQ ID NO: 13104 - DNA, 269 bp, Glycine max
  Clone ID: 701066637H1
cggatgtgatgtctgaactgctccaggaaaatcatcgaagatcccaaaggacttccttgtaacagctgcgtggggaagaacgtgtcaccaagttttcaatacaagacatactcaattctaccatggctgattatgtgaaacaggaaaacttggatgtacaggaccggaagataagcgatagccaaacgctcgagcaactcaaaaaatcattcaaggtcagacatgaatttggctttaatggtatcattgagcctgacaattcataagat

SEQ ID NO: 13105 - DNA, 268 bp, Glycine max
  Clone ID: 701066638H1
gcgacaaacacacacaaacacacaactcacgcccccgcgacaatctttctccggcgacctggaattccgacgaaggtaattgcggctccttcgtcccgaaactgaggccctcaaagtataaactttggtggtggtgggaggatctgcgtggtgtatgatgggatctcgcatatgcccgttggagactccggcgaggttgctttggaccacaagcttcttccgtcataagcttatgatcttctaataattactaattcacgcacacaac

SEQ ID NO: 13106 - DNA, 268 bp, Glycine max
  Clone ID: 701066639H1
cgtctcgcttcctcaaaatttcgccctctttcattcaattctcttctgtgctcttctcttctgttcccaccttctgatccatcatccctcgttttctccgaacaatggctgctggtgtcactgtcaagtccgaggttctgaatcttctccccctgaaggagtatgttccaacacggaggaaaaccacctggttcagaccaatttgtctgatgggtcacccaacaagtctgtgccagcatctggacttaatgcagtgcattcctagtgc

SEQ ID NO: 13107 - DNA, 250 bp, Glycine max
  Clone ID: 701066641H1
cggggtttttgtgatctgcaagctacgatgggtaagggaacggggagtttcggtaagagacggaacaagacccacaccctctgtgtgaggtgtggccgccgcagtttccacctccagaagagtcgttgcgccgcgtgcgtttccccgctgcgcgcaccaggaacatcataactggagcgtgaaggccattaggagaacgaccaccggaactggaacgctgacgtggttgcgtaacgtgccccgtagattt

SEQ ID NO: 13108 - DNA, 264 bp, Glycine max
  Clone ID: 701066642H1
cggtacgtttaagttgacacttcagtttacagaggattatcctaataaaccacctactgtgcgctttgtttctcgaatgtttcatcctaacatttatgcggatggcagtatatgcttggacattttacaaaaccagtgagcctcatatatgatgtcactgcaattctaacctcaacccagtcattgttgtgtgacccaaacccaatttcaccagcaaattctgaagctgctcggatgttcagcgaacacaagcgcgaatacaac

SEQ ID NO: 13109 - DNA, 192 bp, Glycine max
  Clone ID: 701066644H1
ctgaaggattcatgtgctcaagtcatctgtcaatcactcaaagaaattcaagattgctccattctactagcaagattgttccaaattctgaacttcagacatataactactgagatggtgaagacaccagaggtctcaaatggatggatcaagtcatccctacaatagccccttgtgatgcaccagaccatg

SEQ ID NO: 13110 - DNA, 169 bp, Glycine max
  Clone ID: 701066645H1
ggtgctgttcttgcgcgtgaacaagcctcaggtaagccaaaaccatggttaagcataacaatgttatctcaaacggacactcccgtaagcgctggcagaactatgtgaagacttggttcaatcagccagcacggaagcaaggagacgattggctcgtcagaagaaactg

SEQ ID NO: 13111 - DNA, 265 bp, Glycine max
  Clone ID: 701066646H1
cgtttgttgatcgagataactagaaacagtgtgatgaaaatgaaggtccttgttttcttcgttgctacaattttggtagcatggcaatgccatgcgtacgatatgttccctctccgaatgaacactggctatggtgccgtactccggaggtgaaatgcgcaagttggaggcttgctgtggaagcacacaacatctttcggtttgagaccattcctgaagagtgcgctgaagcaacacagaatacatcctggcgaacaatatagat

SEQ ID NO: 13112 - DNA, 199 bp, Glycine max
  Clone ID: 701066647H1
ccggcgctcagagaaagaggggtcatggaagttgaagggtcatcgaagaagatgatagcgactcaggacgagatggtggaggccagggttcctctggcctacagggaccagtgcgcccacttgctcatccctctcaacaatgcaggcaggccgagttctacctcccatggaagtgccaggaccagcgtcactactacga

SEQ ID NO: 13113 - DNA, 261 bp, Glycine max
  unsure at all n locations
  Clone ID: 701066648H1
ctgagataggagaaggtgagaatcataagagagcaagatcgacaatgggagtggagaagcagttgttgaggcctggcaccggtcccaagccaattcccggtcagaacgtcaccgttcactgcactggtttcgggaagaacgtgacctttctcagaaattctggagcaccaaggatcctggccaggaccctttcactttcaaaatcggccaangttctgttatcaaaggatgggatgacggtgtgcttggcatgaaattggt

SEQ ID NO: 13114 - DNA, 273 bp, Glycine max
  Clone ID: 701066649H1
catcgcacttcgttgcttggtgatgtccctttctgttctcttcactcttggtcttgcgagagaaagccatgccagagacgaagatttttggcatgctgtttggccaaacactcccattccaagttcattgcgagatcttctaagcctggccctacgagtgatgacatcgatgatcaccctatgcaaattgaagaaacacagtacccgaaaaccttgttctataaagaagaccttcatccaggcataacaatgaacgtacaattcagcacgcct

SEQ ID NO: 13115 - DNA, 270 bp, Glycine max
  Clone ID: 701066650H1
cgttgggttggattggattggattgtgttgtgttgtgttgggttgtgtgttccatccaactccaactagtccgagatttttttctccttggctgcattgcactttgcaccccaaaaagtgaagggaagggaaaggaagaaggcctaaactacacaccccaaaaacatggagagagctctcattaaagttagcagcatgacggtggggttggggagctcatggatcacccagaaggccaaggaggagttctctaacatctctgaagacttc

SEQ ID NO: 13116 - DNA, 269 bp, Glycine max
  Clone ID: 701066651H1
cagttgtgttgtgtccctcttttaagctatttccttctcttaacacacattggttgtgccacttgccatagtcaccaaccaattaacaaaggtatcatatatcatcatatcatcaccaaatgaaaaatattgggttgttcttcttgtggtggtggctacttttgtggtggcagccacagctggtagcttttaccaacactttgcactaacgtggggtggtgagcgtgccacaatctatgacaatggcaaccttctcacactatccttga

SEQ ID NO: 13117 - DNA, 265 bp, Glycine max
  Clone ID: 701066652H1
gtcgagccgtgaagtgaaatctgcatgggagacaccagctgctgaagctgggaaagcagattgggaattggcattggtggagaatactagtaacttgtcaaggcaaaaggctgacttggcaggggggtttgatccacgttactgaatgggatgtatgatcaaggggctgtgaggcaacatgtgagcacaactcagctgagtggtgggagtgctagtagtgtggcactgcctggacccgggaagagcgccaccccggttctggctt

SEQ ID NO: 13118 - DNA, 264 bp, Glycine max
  Clone ID: 701066656H1
ctgaagagagaagaagatggcgtcgagcggacgctgccgttttggagggcagcggggatgacatacatcacatactcaaacatatgcgcgaatctggtcaggaattgcctcaaggaaccctacaaggctgaagccatcctcgtgagaaggtccattttgctctctccaaatgggtcgacgccaagcctgaaaaacctactattcgttcagacaccccagagcagtgatccggaatagttggacgctataaatgcataaatcttt

SEQ ID NO: 13119 - DNA, 266 bp, Glycine max
  Clone ID: 701066657H1
ctcgagccgaatcggctcgagatccacaacccgcgtcctcacctacgccgccggcaccggaagctggaggacgacgagaagacacccttggtgggagaactcgaggaggtggacgcgagtcccgtggaggaggagggacgagcgagcgggagaagcgcgtgccgaccaaggtcccggaggcagagatccacctgtatcggcaggggcaaggccccgtggcggtgttcaagtcggcactgggcggctgggagcaggatcagctcgag

SEQ ID NO: 13120 - DNA, 228 bp, Glycine max
  Clone ID: 701066659H1
ggcgtcgctgctccgtaccagtttcactgcataaatttgagagagaactctgcaaacatgttggtttatcaggacctccttacaggtgatgagcttctctcggactccttccgttacaatgaaattgagaatggaatctgtgggaagttgaggggaagtgggttgttaagggagccgttgatgttgacattggtgcaaaccttctgctgagggtggagaagatgaggg

SEQ ID NO: 13121 - DNA, 267 bp, Glycine max
  Clone ID: 701066662H1
ccggcgagcaacaaaagggttggtgagtggggggatatgttggattgttaccaagtgcatggatacactcaagaaggttcagcagctatggtgcttgtttgtgctatcggtcatgtagaataagctttgctagatgcagggttgtgtttttgtatctttgcattatcatgttgtcctggagatacttgcacattcggtttactctttcaacacttaactttgtggacatgctctgagtgcttttgtgcatctatattcattcatttg

SEQ ID NO: 13122 - DNA, 258 bp, Glycine max
  Clone ID: 701066663H1
cgggagagagagagagagagagaggtctcacagtgctatcaagaagccctaactacgcacgcactcattcttgagaaagctgcaatattcattcgtccatggcactctcttctcgtctcttttccaaatccaaattgatcttggctgtcaaatacttctgccaacaggagcatgctattccagttcgtcactttgctaaagagtctgcccctcctgcccttaagggagatcagatgctgaagaactttttgtggaggt

SEQ ID NO: 13123 - DNA, 175 bp, Glycine max
  Clone ID: 701066664H1
tgcactttcactggaatcacaatcctgaaacaaaaacatcttagcatttaacatcctactagacaacatgaccaccacattggaaagaggtttctcggaagagcaagaagctctggtggtgaagtcatggaatgtcatgagaagaattcctggagagttgggtctcaagtttttc

SEQ ID NO: 13124 - DNA, 264 bp, Glycine max
  Clone ID: 701066666H1
tctgtgtctctcactctctctatatttgcatcattcatcggaaatggctctcgaggttgctgttaaggctgctgttggggctccaaatgttctcggagattgtccattttcccaaagggtcctcttaactttggggagaagacaatcccttacaaactccacctcatcgatctcagtaacaaacccgaatggtttttgggtgtgaatcctgaagggaaggtgccagtggttctttttgatggcaaatgggtggctgattctgat

SEQ ID NO: 13125 - DNA, 254 bp, Glycine max
  Clone ID: 701066667H1
cagcagcctcgggcagttggtgtgtgtcaccggtgctgccggttatattgcttcatggattctcaagttcctacttgaacgtggttacactgtcagggccactgttcgaaacccaaatgatcacacgaacgtagacatttgctaaaacttgaaggtgcaaaggagagactgcacctttttacggcagatcttttgggtgacaattcttttgactccattgttgagggctgtgatggcgtctttcatactgcttc

SEQ ID NO: 13126 - DNA, 255 bp, Glycine max
  Clone ID: 701066668H1
cctttcttcctcttcctcagtagtgcgattttcgattctcttctctacgactatgcctaaccctacggtcttcttcgacatgaccatcggcggtcaacctgccggccgcatcgtgctggagctctacgccgacgtactccgagcaccgccgacaacttccgcgcgctctgcaccggcgcccagggcgccgggcggagcggcaagcccccccactacaaacgctcgtccttcccaccgcgtgatcccgaacttcat

SEQ ID NO: 13127 - DNA, 258 bp, Glycine max
  Clone ID: 701066669H1
gggtcttcgagaaagagagacccttgggatttcgtcaccatgagtctcctcggtcttggaaacagaaaccggacgacatttcgtccaaaaaagagtgctccatctggaagtaagggtgctcaagttcaaaaacaatcgatgcgccgttgggtagtgggaacttgagggaggctgttaaactgcctcccggtgaagatattaatgaatggctagctgtaaacacgtggacttctttaatcaagtgaatatactgtttgg

SEQ ID NO: 13128 - DNA, 263 bp, Glycine max
  Clone ID: 701066670H1
gtccactcttaatttctctctgccttgctcatttacacacctctccaacctctcactttcagctttatttgaatccctctctctcctttccaaatggccagcgttgaggttgcacatcaaacaccaacaacagtccactgaatgaaacaaccgaggtaattcagacccaggaaacaaccccggaaccagtaccagccactgaggctcctgcaacagaacaagcagcagctgaggttcctgctcaagaagaacaacaagcaact

SEQ ID NO: 13129 - DNA, 267 bp, Glycine max
  Clone ID: 701066671H1
cggaagctgaagttggcaattgcatggatgtggatttgaggataccttccagtctgttctgttttgtttttagtctgggaggtatgacaactattctcggtgttatgtaacaaagtctgttctatttttgtacatctttttttatacgccgtttttgttcttagttgggtcgagatcgattatcaggccctttgtactgaaaaacaatgtattcatagttctgctaatatgttaagtgtgattactcattttgatgtaaaacaaaaa

SEQ ID NO: 13130 - DNA, 265 bp, Glycine max
  Clone ID: 701066672H1
ctgatgtgaagtccaaagaaataggcaaggcccaagggttttacctatccgcaacccaaaggcccggtttggagttagagatagtcatggggatggctttgaccttcttagaaggcgaattcaacggtagcagttaagtgtattggggagaaacaacatcttcaatgaggtaagggagttgccaattattggtggcacgggtgagtttcgcttcgcacgtggctatatccttgctaggactgtcaaggtcgattaccataaaggg

SEQ ID NO: 13131 - DNA, 254 bp, Glycine max
  Clone ID: 701066673H1
gatacggactcccattccgactcttagccgccgatctctcagggcttgcatcttctcaggtaagctgtgaagatgtacacatcaaggaagaaaatccacaaggataaggatgctgaaccaactgaatttgaagagcagttggacaggcattgtttgatctggaaaataccaatcaggagcctagaagtgatctgaaggatttatacataaactcagccgtgcacattgatgtttctggaaaccgcaagctgttg

SEQ ID NO: 13132 - DNA, 103 bp, Glycine max
  Clone ID: 701066674H1
cggaaagaaaatcctcacccattttcttcgtagccaaacactctgaaattctcagttatgtcgtggcaagcgtatgtggatgatcacctactgtctgaaatcg

SEQ ID NO: 13133 - DNA, 246 bp, Glycine max
  Clone ID: 701066675H1
gtgtttttggcggttaaggatgtcggggaaaggagcgaaggggttgctcacaggcaaaacctccgccgccaacaaagacaaggacaagaagaaacccatctcgcgttcttctcgtgccggccttcagttcccattggtcgtatccaccggcttttgaagtcaaggacaaccgctaatggtagagttggggccacagctgctgtctactctgctgctatcttggagtatctcactgctgaaatattg

SEQ ID NO: 13134 - DNA, 86 bp, Glycine max
  Clone ID: 701066676H1
ggtaactggtaacggcttcataccggacgtttccttttctgtttttctctcaacttcaaagtgagaatcttttgttcactcactga

SEQ ID NO: 13135 - DNA, 146 bp, Glycine max
  Clone ID: 701066679H1
gatgacactgttttccccccctcaaccccatgcgtagaataaatagatgtctccaatttccttcttcttgatcaaaagtcgtagaactagacggttacgttgaaggcgatatgaaggtaaccacaggccaggaactcaaattgttc

SEQ ID NO: 13136 - DNA, 222 bp, Glycine max
  Clone ID: 701066680H1
ataggagaggagagcttcaacaacaccatcaacacaggaatctgagtccgaaacaagcatttttgcgtgttcctcccccattcgtcaggtactagacttctaggaaaatcagatgtatcacggtaaattttccctacacccaagaatgaagttccaggacttgacaggttcaagttttcccagttacaaacatagcagtcagctggctcccatagatgtttc

SEQ ID NO: 13137 - DNA, 267 bp, Glycine max
  Clone ID: 701066681H1
ctgtctctctctagacttagattttgtgaatggctgaagtggaagagggacaggtcatcggcgtccacaccgttgatgagtggaagctgcaactccagaatgcaaaagactccaaaaaactgattgtggtggatttactgcttcctggtgtggtccatgccgttttatggccccagttcttgcagagattgcaaagaaacatcctgaactgatcttcctcaaagtggatgtggatgaagtgcaggctgttgctgaggaatattccat

SEQ ID NO: 13138 - DNA, 264 bp, Glycine max
  Clone ID: 701066682H1
cctgaattgtgttgtgttgcaaacagaaaggaaaaaagaagaaaataagagcacgaagaacaatatgagttacttgaatcgtgtttggatggcggcaacggtggcggtagcgcaaggccacaccgatcccggccacagtgccagacggcgctcaactccatccaccacaaccggagccgcctcttctccggcggagccctgtctgatctccggccgctgtccggcgtcgttggacctgacgtctctggcgcggcagcggggagc

SEQ ID NO: 13139 - DNA, 266 bp, Glycine max
  Clone ID: 701066683H1
cgttaagcttgctactgagtttccacactgcataccttcggtcttccggattcgaagttactttgcaagatggctaaggaaaaggctcagatcaacattgtggtggttggtcatgtggaccctgaggaggcaaccccattaacgagctgaagaagcctgttgtggagacagaagctccagggcatgccatatgagggcatgcacgtacggcctcggaggggaaccagaaaattcatgttaacaacataatctggaaccctaatgta

SEQ ID NO: 13140 - DNA, 191 bp, Glycine max
  Clone ID: 701066684H1
gtaatcatcagcatgctcagtttgctgataaaaaaaaaaaaaatcagcatgctcagtttatattatcatcctcttcctctcgtagggggtttttattcggttttttcctttgttagtattatttaggtttacaattttaacccaaagtggtcgtgacattatcttctacatatatttatgatccttttctc

SEQ ID NO: 13141 - DNA, 266 bp, Glycine max
  Clone ID: 701066687H1
gggagaaagaaaaaaggggaatttcaatggcgtcaagggtttctctgaaggcgaaggggaagagttcaaagggatcgaaggctgcggaagatcgatccgcgagcgagtgcctgaaggagtggacgacatgcgcgagcgaaaagcgaaggtcatcactcactacggtttcatccctttggtcatcgtcatcggtatgaactctgaccccaagcccccactttcccagcttctcagccccgtctgatccacctcttcaattcttccac

SEQ ID NO: 13142 - DNA, 256 bp, Glycine max
  Clone ID: 701066688H1
cgtccattgcttaacaggtaacagtaacactcagaacgcaacacagagagagtgagagagaatcacaaaccctcattccatttcctcccttttctctcttgcagtcacgcaagcagcaaggatcgcaattgcatttgtgggaatcggcggcgagaaaatgcagggttggttctcggggcagagtagcgaggaggaggcgaagcgaccgtcgtcgttgctcgccgattggacactctacgcatccgcccaaactctg

SEQ ID NO: 13143 - DNA, 207 bp, Glycine max
  Clone ID: 701066689H1
gtgctggggcgcctagggttccggtttctgagagatgtgggatgttccatgcattgatgagccttatcgcgcgctgttggaagccgttcgggcacggtgacgacgccgctaatgccgccgccgccgccggaaagaatgcaaggacggcctcctctggttccgcgacatcggaaagttcgccgccggcgatttctccatggccgtcgt

SEQ ID NO: 13144 - DNA, 184 bp, Glycine max
  Clone ID: 701066690H1
gggaagggaagaagctggacttactggagttatgggcacttttcggccccggcgtcccggcgctgtcttcggcgccggatggtggatctggcttgacgcggtcgtctgcagcttggtcaccgttcccttcctcactaccttcccggaattttcgcatcttttgcggctttgatgttcaattgcg

SEQ ID NO: 13145 - DNA, 215 bp, Glycine max
  Clone ID: 701066691H1
cttcctccaattataacacccaccaaagaaccatggctacccagttcctcaaatccctccttctcctctccaccttaaccctaaccatctcagcagaatacacaggctttgtgggcacaatagacccaaagtcataggcataaagcacaagaaaaccctaagccacttcagattctactggaccgaagtcttcagcggagaaaaccccacatggg

SEQ ID NO: 13146 - DNA, 246 bp, Glycine max
  Clone ID: 701066692H1
gttgggccatgttgggtgttgcaggaatgctacttcctgaggttttcaccaagattggactcatcaatgcccctcaatggtatgatgctgggaaatcggagtactttgcttcatcgtcgaccctctttgtgatgagttcatcttgttccactacgtcgagatccggagatggcaggacatcaagaaccctggctctgtcaaccaagaccccatcttcaagcaatacagcttgccccacatgagtgt

SEQ ID NO: 13147 - DNA, 113 bp, Glycine max
  Clone ID: 701066693H1
cgtattttgtatctttttcgtcgttcacgtcagaatcctaaaacaaggtctatacaagggcaaacccataaatcataaacagcgaagttacgaggattctgtagagaagaaga

SEQ ID NO: 13148 - DNA, 260 bp, Glycine max
  Clone ID: 701066694H1
cgcgagaggaagaacagtgtggttcggattggggaaggccaaccaagcctaataactatttggttcagcagcaacaggttaaggttcagagtagagcgcgtgagtttgggcacgagagtgtgaatgcgaaatcactcgtccatctgcgtggccccctttgcaagttcagcagcaaaacaaccgggtacagtttggcggatccgggtctagggttggtggatcttctgtgaaaagggggtgtggtggaactggggtgttct

SEQ ID NO: 13149 - DNA, 268 bp, Glycine max
  Clone ID: 701066695H1
cggccactctaaagaaaatggcggtgcctctactctcgaagaagatcgtgaagaagagggtgaagaagttcaagaggcctcagagtgacaggaaaatttctgtcaagacaaactggcgcagaccaaagggtatcgatcccgtgttaggagacagttcaagggatgcactttgatgccaaacattggttatggttcagacaagaagacccgccactatctccctaatggttttacagaaatttgttgttcacaatgtgaaggcacttgg

SEQ ID NO: 13150 - DNA, 290 bp, Glycine max
  Clone ID: 701066701H1
cgccgcgcccggcggtcggcgtggtcgctggcgcgaggcacgggctctctacggagagtatctcgcggttactcgtgccggcgtccgagtgcgagttcactctcaattcggtattggaggagctgcagaaggatccttgggcggtgccggcggatcagcgggctcgctcggtgcaccagcacggcactgagtattgcggcgagtttgttgggggcatgtgtccctggctctgctgcaagaataatggcatttattggaggaccagctactgaaggacctgctcctattgt

SEQ ID NO: 13151 - DNA, 285 bp, Glycine max
  Clone ID: 701066702H1
attgcatgttcccgtacagttcactgttatacgttgtgatacctgtggggctgcagggtccacacagagatctctttgtcacaagtgccatgaaggcgcagagcacacttactgtatgcatcctgatgagcagtcagaactagaagcaaactggaagttcgtgaagattggacatgtcaagagtgcatgccgagggaaggaaagatctaatggtgaaacttcatttcctggacatagattactggtaagcaatgacaacactcacaaagacccaaactttccaaa

SEQ ID NO: 13152 - DNA, 281 bp, Glycine max
  Clone ID: 701066703H1
ctctttcaaaagggagaagaaaaggaaaggaaacaaaacgcacaaaggattattatagcaatggcagaacaaaaccaaaaccagacaactgaagctgcaaggcaccaagaggttggccacaagagccttctccagagtgatgctctttaccagtatattctggagaccagtgtctacccaagagaacctgaatccatgaaagaactgagagagttgacagcaaaacacccatggaacatcatgacaacctctgcagacgaagggcaattcttgaacatgct

SEQ ID NO: 13153 - DNA, 280 bp, Glycine max
  Clone ID: 701066705H1
cttctctccctgctacttctagggtttcgcttctgcaacggacgacccttcttcaactcatcaaagttgactttgtgagccaattcaatcaggcttgagaaggtatcctagtgttgtttgttcaccttcatctccatgatggaatactgtaaagatgtcctcagctgtcttgattcggatacgtctcttacgatattcatgtgtctggatgatctggctgatcttgttcgggttacttgtgtctcgcgatcttggagacaccttgtgatagcaaatggtc

SEQ ID NO: 13154 - DNA, 278 bp, Glycine max
  Clone ID: 701066708H1
ggcggcgtaaccctccaacaacaacacttcctcgtcagaaaatgtctctggtggcgaacgaggatttccagcacattctgcgtgtgctgaacaccaacgtggatgggaagcagaagataatgttcgcaatgacctccatcaagggtattgcaaggagattcgccaacatcgcttgcaagaaggctgatgttgacatgaacaaaagggctactgagttgactgctgctgagttggacagtgtgatgactgtggtggcgaacctaggcagttcaagatcc

SEQ ID NO: 13155 - DNA, 278 bp, Glycine max
  Clone ID: 701066709H1
aaaattacaacaagctgttgtctcttggcttcaagattgtattcttgtcaggaagatatcttgacaaaatggccgtaacagaagcaaacctaaagaaggctggcttccacacatgggagcagttaattctcaaggatccacatcttatcactccaaatgcactttcatacaaatcagcaatgagagagaatctgttgaggcagggatacagaattgttggaatcattggagaccaatggagcgatctgcttggagaccacagaggcgaaagcaggacc

SEQ ID NO: 13156 - DNA, 59 bp, Glycine max
  Clone ID: 701066710H1
ctttggatgcggttgtactgccccccaataatgagttcatttctagtattgaagtcctt

SEQ ID NO: 13157 - DNA, 250 bp, Glycine max
  unsure at all n locations
  Clone ID: 701066711H1
tgagagtcgttcttgacagtagcaaagatggtccccttcgggcccaatggtcaaaagataaaggcgactatggtggttatgcagacgactgtgttgcatatcgacagcatcaccagtgttggagggatcgttgaccaaggcttaggcttcataggcagtgcagtcgatgacttaccttgnagcatcagatcccatccagtgctactgctacaaggctgatggcgggaaagaaactggaagagtcaattaa

SEQ ID NO: 13158 - DNA, 278 bp, Glycine max
  Clone ID: 701066712H1
ggggtttgaggaaactgagttaaggcttggactgcctggaaacggaggcactgaagaagtgctcatcaggaagaggggtttctctgagactgaaactggtcatgaagatgagtctgccaccactgtggatttgatgcttaatctttcttctaaggaggccgcaaccactgctgctgctgctgcagatccaactgataagcacaagactttgcctaaggagaagacccttctgccagcagatcctgctaagcctccagccaagacgcaggtggtgggtt

SEQ ID NO: 13159 - DNA, 281 bp, Glycine max
  Clone ID: 701066713H1
aagacttattagaaaaggtggtaaagccaaaatgtttataagaaaaaaacttaactggaaataaaggtaaacttacatttgctgtgtgtttcgctgtttctggttcttccatcttaataaagtttccattaaagaaaaaagacagaattgaagaagaaaaagaagaaaagttgcagtgatggtatcgagaaacgtgtccttgaggcaaatattcgcggagaggagcaaggaaagactcctctcgcgccatgagttgccgctgaatggcagcaacaacagag

SEQ ID NO: 13160 - DNA, 283 bp, Glycine max
  Clone ID: 701066715H1
gagaattggtaatggatcttatctcaacatggtgtctcatccggatggctctaaccgtgcattcttctctaaccaaatgggaaaggtttttctggcaacacttccggatgagggatcaggaggaacattgaagcttgatgaatcaagtccttttgttgatctgactgatcaagtttattttgatactcaatttggaatgatgggcatggcatctcatccagattttgctaaaaatggacgattctttgcttcatttacatgtgataagtccaagtggtctgga

SEQ ID NO: 13161 - DNA, 202 bp, Glycine max
  unsure at all n locations
  Clone ID: 701066717H1
caacttcataggaaaaaaaagatctcactatcaccgcatttcattttcatttttcttctttactcatgcctaagataagccaagaaaaagatggatctgaaaccgaaaccctaaaaccaatcatggatccatttccctttccacatttagctaccaacaaanntaatttcaatttctctgtgaagagtcattttccgatgaa

SEQ ID NO: 13162 - DNA, 284 bp, Glycine max
  Clone ID: 701066718H1
gagagagagagaaatggcttgcaggcaattgtgggcttcaagagctgcctcttacctgaggatctctgtgtttcacagaggcttttctaatgttattaaagatttcaagtatgttgattctcatgagtgggtgaaagttgatggaaattacgcaaccatcggcataactgatcatgcccaagatcatttgggtgatgctgtatatgttgaattgccagaagtgggagcagctgtgacacaaggaggtagttttggtgcagttgaaagtgtgaaggctactagtg

SEQ ID NO: 13163 - DNA, 281 bp, Glycine max
  Clone ID: 701066719H1
caacagtgacgcctttgtcacagtctgtaaagggtccaaatgttaaagattctttgcaaaaggatgcaaaagtcaggaagatgggtgtgacaccctcaggtcagaaccccaacttgtttagtgacttgcttggctagtctgattgaaaggacaattctaaatcatgatgtttgaggatagattaccttgcaacttaccactcgttggagtttcagaaacagttgggtatcatctgatatatgcaaaaattgaataatatgattcgtgattaggcatggatg

SEQ ID NO: 13164 - DNA, 278 bp, Glycine max
  Clone ID: 701066720H1
cttggtaacagtttgcagtacgttgagcataccagagtctgagatggaaaacggggatcagttccaggaaatttcaaaggggaaatatgattgtcttttatttgatcttgatgacaccctttatcctttgagttctggattggctgagcaagtgaaaaaaaatattcaggagtacatgcttcaaaagctttggatatcagaggctaaagttcctgagttgtgcttttcattatacaagacttacgggacaaccatggccggtctcaaggctattggct

SEQ ID NO: 13165 - DNA, 237 bp, Glycine max
  Clone ID: 701066721H1
caacgtcgtctcccccacctccttatcactacgtgagccctccaccaccaaccaagtctccaccaccaccagtttacatttatgcttcccctccaccacccatctacaagtaagcttggaattaagaagcagcaacaataataagtcatgttctagtattcattgtggaataaatttccgttccatttggagcagagttaagcatataatttgttatacaagttctttgaataagag

SEQ ID NO: 13166 - DNA, 280 bp, Glycine max
  Clone ID: 701066722H1
attcattccccttatctttctctcttctctctccccgcccaaaccctaactccctaccctattccgctttctctcatccatcatgaaaggaggaaagtccaagaccgaatctaagagagccgatgccaaacttgctgtgaataagaagggcgccgccaccaagactaggaaacccgccggaaaggggaaggcagtggcgaggtttgttttcatacgtttttcatcattgtcttgtgggtttttatcatttttgcagttttcttattttgtgctgtttatt

SEQ ID NO: 13167 - DNA, 279 bp, Glycine max
  Clone ID: 701066723H1
cagctatgtttcagccgccaattttggagttccatccacagagctgattacatggcattgcgcttaggcttcattactaatcatggtcttcccacaacatacgacttccacaactatatgcttcgaagcatggatgaggaatttcgtgacatagttggtgttagtgtgcttctctgggtatatgccatctgctgtatttttctaaattttcacggaagcaacttttacttctggctgtccttcgttccagcaattttgatccttatcattggtactaaa

SEQ ID NO: 13168 - DNA, 279 bp, Glycine max
  Clone ID: 701066724H1
accgtttgtacccagagattgatccagctctgaaccctgaccacgtccctcacattctgaagaagtgccctgatgccattccagaccctaaggcggtgcagtacgtgagaaacgaccgtggcactcccatgattctagacaacaactactacagaaacatattagacagcaagggtctcttgatagtggatcaccaactagccaatgacaagaggaccaagccttatgtgaagaaaatggccaagagccaagactatttcttcaaggagttctctagag

SEQ ID NO: 13169 - DNA, 275 bp, Glycine max
  Clone ID: 701066725H1
cgctaagtgtcactttgttggaattgatattttcactgccaagaaacttgaggatattgtgccctcttctcacaactgtgatgttgctcatgtgaatcgtactgattaccagctcattgatattgctgaggatggatttttgagtctgcttactgaaaatggtaacactaaggatgacgtcaagcttcccactgatgagagtctgctcactcacatagaggatggatttgctgagggcaaggatcttgttgtgtctgtcatgtctgctatgggtg

SEQ ID NO: 13170 - DNA, 277 bp, Glycine max
  Clone ID: 701066726H1
atcaattcattgaagttcgtcctgggattgttgttaaagatgagagtggaaatatcagatgcacgcccatatactcaagaatagtttcattgtatgctgaacaaaatgagcttcaatttgctgttcctggaggcctaattggtgttgggacaacaatggatcccactttgacacgtgctgataggttggtaggtcaagttttgggagacgttggatcactacctgaggtttttgttgaacttgaggtaaactttttcctgcttcggcggctccttgg

SEQ ID NO: 13171 - DNA, 278 bp, Glycine max
  Clone ID: 701066727H1
ataagctagtttatcgtgaggagaatatgaagttgtatgtctctcactgttgctgcagtagttttggtagcatggccatgccatggcgcacgctaccaaaggttccctctccgaatgaaaactggctatggtgagcgttcttcggaggtaaaatgcgcaaattttaggcttactgtagcagcacacaacatccgagccgttaaaaccattcctgaagcgtgcgtagaaccagcaaagcgactacattaatggcgaacaatttagatcagactctaaaa

SEQ ID NO: 13172 - DNA, 278 bp, Glycine max
  Clone ID: 701066728H1
ctaatggcgaaggacatcaacctcagctctcgaacccctctgctcttgctgttatgtttcaccagtctcaccgaggctgtatggttaaccatccccagcgagggaaccaagtggatgtccgaggaaatccagacacacgttgtcgttttagcagattactatgttgtagccgatgatgtccagggtcaccaacttcaaactatttccgccaaggtgacatctccttatggaaataatcttcaccagaatgtgaatgttatccacggtcagtttgcatt

SEQ ID NO: 13173 - DNA, 111 bp, Glycine max
  Clone ID: 701066729H1
attacatagcctcagtaatctgagagagaaacaaaaacaatgaaggtctccattgccgagttccactcccttcccctatgcgtcacacttctcgtggccttcaacacaaaa

SEQ ID NO: 13174 - DNA, 273 bp, Glycine max
  Clone ID: 701066730H1
ttggattgttcctccgaacagtgaaccctcacctaacaatcagaacccaggatttggtgaaacgatgaacagtgataggaaaattggggttgccttggacttttccaaaggaagcaaaatcgctctgaaatgggctattgacaatcttatcagcaacggtgacactctctacatcgtccacaccaagccttccggaggaagtgaatcaggacatcttctgtggcccaggattagctcacctctgattcaatggccggatttccgtgaaaagga

SEQ ID NO: 13175 - DNA, 285 bp, Glycine max
  Clone ID: 701066731H1
gcaaagcactagaaactaggaacagagaagcaatcagttgccaaactatttttctctctcctttttttgacttttctttctttctgcaactccaaaatgtcttccataggggcaaaaaatctagcactctcctcagcctttttgctccttttggtcggttttgcaacctcagacatcaaccaagacaaagcagaatgtaccgacaaacttcttggtctagctggttgtcttccctatgttggtggtgaagccaaagtccccgccatggattgttgctctggtatc

SEQ ID NO: 13176 - DNA, 202 bp, Glycine max
  Clone ID: 701066732H1
ataagtcattacatattggctcaaatggggatagcagaagcatgctccagattccttggtgactttttacaagcattgaaatgctcctcaaaaagctcagtgtctcaccttgatcataattatcatgacccttcttcatgcaagccccagaatgtgctcaaacttgatgacaagatggttggtgcccttgtcagtgttttgg

SEQ ID NO: 13177 - DNA, 283 bp, Glycine max
  Clone ID: 701066733H1
ctaagccttataaataataagagcaaaaaaaaaaaaccaaaacaacgagagagagaacatgggttcaagttcagcatccgaaagtgtttgcgttacaggagcctctggtttcatcgggtcatggcttgtcatgagactcatcgagcgtggctacacggtccgagccactgtacgcgatccagctaacatgaagaaggtgaagcatttggtggagcttccaggtgcaaagaccaaattgtctctgtggaaggctgatcttgctcaagagggaagctttgatgaa

SEQ ID NO: 13178 - DNA, 279 bp, Glycine max
  Clone ID: 701066735H1
aaagtctgttgtataatacaatgtaattttcaatattctttaagcatataattcaagattcgtaaagcaaaagcaagggaagattttgatatgcttgagaatatgaagtttgcttggtagtgaattgacctctttcatatggactgagtgagaaagatgttaagactatattcttattttggagaaaatatatccttttgctggaagagtattttctcaatgggctatagtactctgacttctatagtcatgataagctttagattaaaatcactaaac

SEQ ID NO: 13179 - DNA, 279 bp, Glycine max
  Clone ID: 701066736H1
gcaagaatggcacttcgttgcttggtgatgtccctttctgttctcttcactcttggtcttgcgagagaaagccatgccagagacgaagatttttggcatgctgtttggccaaacactcccattccaagttcattgcgagatcttctaaagcctggccctgcaagtgttgaaatcgatgatcaccctatgcaaattgaagaaacacagtacccgaaaaccttcttctataaagaagaccttcatccaggcaaaacaatgaaagtacaattcagcaagcct

SEQ ID NO: 13180 - DNA, 277 bp, Glycine max
  Clone ID: 701066738H1
gagaaactgataaggcagggatacaacattgttgggatcattggagaccaatggagcgatctcctcggaggccacagaggcgaaagcaggacctttaagcttcctaatcccctgtactacattcagtagttccttcacctctcaacaatctagcttgctcctatctatctatatgtaataagatgcgttcaaataggggcactagcttcactttatgttgtttcagctgtgtgtcaacaagtcatgtaagagacttcactatgttgttttctctttc

SEQ ID NO: 13181 - DNA, 278 bp, Glycine max
  Clone ID: 701066739H1
ctcacccaccctccatacacactctctctgagtcggtcgagttgaatcggtgtgagtcagtgaccgagtcgaaccatgtcggacgaagaacaccatttcgaatccaaggccgatgctggagcctccaagacctatcctcaacaagccggaaccatccgcaaaaacggttacatcgtcatcaagggtcgtccctgcaaggttgttgaagtttctacttccaagactggtaagcacggtcatgccaagtgtcactttgttgggattgatattttcactgc

SEQ ID NO: 13182 - DNA, 275 bp, Glycine max
  Clone ID: 701066741H1
ggtttctgttcttctcaatttgtttgaatttgtataaacttagcaattttctctgctcaccaagccgttggtttctcagtgctcacgccaaagatcattctttcttcttctgaattgaagaatggcacaagatattgctactccaccagttccttttgattttgaactcttggttggtgatcaccttagaactgtcacagcctcatccaacagcagcaggacagacccatggattgaacctgaaaggttgaaactcagacacaggattggtcggg

SEQ ID NO: 13183 - DNA, 273 bp, Glycine max
  Clone ID: 701066742H1
aaaccttattgtgctgaatcctccaaatgggtggcgtttgtggacaatgaaatccaaaaggcatgtgtgggtattggtggtcctgaaggtcatcctggtcaacaaacatttagtggcacatttagcattcagaaatataaatttggatacaaacttgtgttctgtatcactggctcaggcacttgtttagatattggaaggtttgatgccaaaaatggtgagggaggaagacgtttgaatctcactgagcatgaggccttcgacattgttttc

SEQ ID NO: 13184 - DNA, 277 bp, Glycine max
  Clone ID: 701066743H1
ggaaatatctctcacgagtttgtataaggagagaagcggacacacaagaagcaattagcatcaaggcgtttgctgatgtgggttatggtccatttgagcatttcaggagtgttgtccaagtccaaccacaccacaactacaacttctctgctgtgcgatggctccgtagaggactgcctcaacgttcaccacttggactcacagcttcccaccatctccagcacccacttccgcagaatcctcgctggagaaaaatgctgcagaggtaacactcaga

SEQ ID NO: 13185 - DNA, 277 bp, Glycine max
  Clone ID: 701066744H1
cttgtcaaggcacgcatctgatgagttctaccttgggcagagagatggtggtgactactggacttctgatgccggtccattagaggcatttaagaggtttggaaagaagcttgaagagattgaaaagaagcttatagagaagaacaaagatgagacattgagaaaccgctatgggccagctaaaatgccttacactctgctctatccttctagtgaggagggattgactttcagaggaattcccaacagtatctctatctaaggaccctatggttgc

SEQ ID NO: 13186 - DNA, 275 bp, Glycine max
  Clone ID: 701066745H1
tgaagattccgcaacagagagtagaaaagatggcgcggttgatcacagtggtgtggtgcgcggtggcggtgctactgtgcgctacggcgggcgcgtcgtgggtggaggaggcggcgaacccgatacgaatggtggcgggggtggaggcggaggtggttcgggtgatagggcagtgccggaccgcgctgaagtttgctaggttcatgagcaggttcgggaagagttaccgaagcgaggaagagatgagggagaggtacgagatattctcgcaaaac

SEQ ID NO: 13187 - DNA, 263 bp, Glycine max
  Clone ID: 701066746H1
gtcccaaaaagttgatggtgtgcttggaaggacttatagattggattttgagaaccctgcaaaacctggtgtggctatgcctgttgttggtggagaagacaagtacagaactaactcattgctctctcctcattgtggttcttgtgtgttctcacagggaagttcaactgagaaagagaccactccccaacaagtgatggaatatggcacccttgattgcaccaagttttcatatgggttgggaattgtttgcaggaaatgag

SEQ ID NO: 13188 - DNA, 281 bp, Glycine max
  Clone ID: 701066747H1
gttccacgttgttgttcgctctgtgtctctcactctctctatatttgcatcattcatcggaaatggctctcgaggttgctgttaaggctgctgttggggctccaaatgttctcggagattgtccattttcccaaagggtcctcttaactttggaggagaagaaaatcccttacaaactccacctcatcgatctcagtaacaaacccgaatggtttttgggtgtgaatcctgaagggaaggtgccagtggttctttttgatggcaaatgggtggctgattct

SEQ ID NO: 13189 - DNA, 244 bp, Glycine max
  Clone ID: 701066748H1
agaagatggagatgtatcagatctggagcaggagaatagcgttgggagcgttcgcgtttgttctgcttttcctatcggcctcagcagacgacgtcgttgtgctctctgaagataacttcgagaaggaagttggtcaggacagaggagctctcgttgagttctatgctccttggtgtggacactgcaaaaagcttgctccagaatatgaaaagcttggtagcttcttcaagaccgcaacagctgt

SEQ ID NO: 13190 - DNA, 282 bp, Glycine max
  Clone ID: 701066749H1
gagaagaagagcaaaatcgctgtgaaaatgagcggaacggtgaagaaagttagcgatgtagcattcaaggtgggaaggaacatcgattgggatggaatggcgaacttctggtctccgatgaggctcgcagggagttctccaatctccgtcgcgtcttcgacgaggttaactcccaactccaaaccaagtttagccaggaacctgagcccattgattgggattactatagaaagggaattggcactcgtttggtggatatgtacaaggagcattatgagagca

SEQ ID NO: 13191 - DNA, 282 bp, Glycine max
  Clone ID: 701066750H1
gagagagagacggagatggagatggagaaaacgggcgcaggagtagtagtgttatcggcgaaggaggcattcgagaagcttgagaaggtcggagaagggacatacgggaaggtgtacagggcacgagagaaggccactgggaaaatcgttgctctcaagaagactcgtcttcacgaggaccaagacggtgttcctcccaccacacttcgcgaggtttccatcttgcgaatgctctctcgcgatccccatgtcgttagcttaatggatgtgaagcaaggccag

SEQ ID NO: 13192 - DNA, 278 bp, Glycine max
  Clone ID: 701066751H1
gcacttccccagttttgatcttgtaacactttttcgggtttgttgaatctgcttctttttatttcaatttgggattgactcatatgacaagtatgtatagtggtggttacactgctctagttacaaacttatccccaagagcaacagaggatgatgtgcgcaattttttcacatactgtggtttgattgagcatattgaaatattaagatctggtgaaaatgcgcctactgcatatgtgacttaccgggatgcttatgccctggaaactgcattattg

SEQ ID NO: 13193 - DNA, 273 bp, Glycine max
  Clone ID: 701066752H1
cttttattcatgtcgtgaactctctcccttcatctagctcgagtttttttcttgcttccgggagctctgaacttgaccgacgtcgttttcacatcaaaacccttcaacaaaaaaatggcgttcttcttgaaccaaactagtatcgcttcccattttcgatctcactctcagaagactgaagatttggcttcttttcctcgccgtcgattccacgtcgaaccaggggctcgtgaaaaagctctcttggcagaagatgcaactctgaaaccgttc

SEQ ID NO: 13194 - DNA, 277 bp, Glycine max
  Clone ID: 701066753H1
taagagatgaagagaactcctatcttgttccctctcttctttcttctttgtgccttcacctcatatctaccttcagccaccgctgatgatgatcatgtgtacgacactgacggcgataagcttcaatacggtgtcaattatttcgtgttgccagtgataagaggaaatggcggtggaatacaagtagcaaaagcaggaaacgaaacttgccctctgactgtggtgcaatctggcaacgagctctctgaggggttaccgataaagattgcatctcgat

SEQ ID NO: 13195 - DNA, 275 bp, Glycine max
  Clone ID: 701066755H1
ttcttctcttgcggctagggttttagcgcagcttcttctagatttaaggaatatgggtaaggaaaaggttcacatcagtattgtggtcattggccatgtcgactctgggaaatccactaccactggtcacctgatttacaagcttggaggcattgacaagcgtgttattgagaggtttgagaaggaagctgctgagatgaacaagaggtctttcaagtatgcctgggtgctggacaaacttaaggctgagcgtgaaagaggaatcaccattgata

SEQ ID NO: 13196 - DNA, 277 bp, Glycine max
  Clone ID: 701066756H1
cctttcccaaaactaactcaaacttctatggaagcactctccttcatccccaaagactcttgctcacttctccttcgccctccttcttcttcctctgtcagaacagcgccgccacttgctttcttcaaaaccacccaacactctcactcgcaccttctccgtcttcgcgtttctgctctcccaaacaccgacgccgccgatgaacccaccaacgacttcaccttggcgtctcaacctctggaaaatttaagccattccgagaccgagagttccgaag

SEQ ID NO: 13197 - DNA, 267 bp, Glycine max
  Clone ID: 701066757H1
tgataaaggaattcaacacccaaaccgaggttagtgtgagattggaagccctctgggcagttctgtccaaggatttcgtcaccgtagctccaaaggtactccccaatattgtgaaggatgtgcaagtgattgaaggtgatggaggggttggtacaatcctcatctttaattttttgtctgatgtgtccccaagttacaaaagggagagatcacagagtttgatggaattcacatgaaaattgggtgccagtgatgcaggaggttatc

SEQ ID NO: 13198 - DNA, 277 bp, Glycine max
  Clone ID: 701066758H1
cctaagctcactctttctaagtctcttctatcctctctccgccatggttctctccaaaaccgcctccgaatccgacgtctctgtccactcaaccttcgcttctcgctatgtcagaacttcgcttcccaggttcaagatggcggaggagtcgataccgaaggaggcagcataccagatcataaacgacgagttgatgttggatgggaacccaaggttgaatttggcatcatttgtgacgacttggatcggagcagagtgtgataaactcatcatggct

SEQ ID NO: 13199 - DNA, 274 bp, Glycine max
  Clone ID: 701066759H1
cgcgtcgctgctccgtaccagtttcactgcataaatttgagacaaaactctgcaaacatgttggtttatcaggacctccttacaggtgatgagcttctctcggactccttccgttacaatgaaattgagaatggaatgctgtgggaagttgaggggaagtgggttgttaagggagcagttgatgttgacattggtgcaaacccttctgctgagggtggagaagatgagggagtcgatgacgcagctgttaaggttgttgacattgtcgatacat

SEQ ID NO: 13200 - DNA, 275 bp, Glycine max
  Clone ID: 701066760H1
gtaggtggaagaagaagagaaaagagagagaagggtaaggtaaccctagagtggtgaatcgaatctgcaaagatggaagctgtttctcgaagaagaggtggaggcattttcgaaagcctctacaaggtcgttatgcgtcgcaactctgtctacgttaccttcgtcatcgctggcgccttcctcggagaacgggctgtagattatggagtccacaagctctgggaggctaataatgttgggaaacgatatgaagacattcctgtgctagggcaaag

SEQ ID NO: 13201 - DNA, 280 bp, Glycine max
  Clone ID: 701066762H1
gcggaatctgctagaattttctaataatggcgaaagacgttgagcaggtcacagagcaaggtgaatactccgcgaaggactaccatgaccctcctccggcaccgttgatcgacccagatgagctcacaaagtggtccttgtacagagccgccatagctgagttcatagcaacactcctttttctttacatcaccgtgttgaccattattggctacaagagacagagtgacaccaaaatccccggtaacaccgaatgtgacggcgttggcattttgggcat

SEQ ID NO: 13202 - DNA, 275 bp, Glycine max
  Clone ID: 701066763H1
cgcgtttcgcaatttccccaaatctcacgcctagaatttctatcgcaaaccctcactcccttcattaaggtcgcgcgcgaagggatttcgaagcttcggaaggaaaaaaaaaaagatgaaacctgttttctgcggaaacctggacttcgacgcgcgtcaatccgacgtggagaggctcttcagaagatacggcaaggttgatagagtcgacatgaaatccggattacttggaaatttggaatgtccatgctcttcttggatggatgtgcttctct

SEQ ID NO: 13203 - DNA, 181 bp, Glycine max
  Clone ID: 701066764H1
aaagaatatgattgattattgatcatttccggcataatattattcccaggatagaagaaggcatgaatcgatgaagtagcccgctctcataacaaaccaccaacgaccaacattgggaaaggcaaagaaaaaattggtggaagaaagaagctaaggtagaaaaaagcagagcttaagattg

SEQ ID NO: 13204 - DNA, 280 bp, Glycine max
  Clone ID: 701066765H1
ctcccacactcgctcgcttccccaaaatttcacccctttcattcaattcttccctcttctctgctactgatccatccctcgttttctccgaacaatggctgctggtgtcactgtcaagtccgaggttctagaatcttctcctcctgaaggaccttgttccaacacggtggaaaaccacctggtccagaccaatttgtctgatgggtcacccaacaagtctgtgccagcatctggacttgatgcagtgattcctagtgcaaatcagcttaccatcttctat

SEQ ID NO: 13205 - DNA, 275 bp, Glycine max
  Clone ID: 701066766H1
ccgagaggaaggccgcggagttgaccaaaattattgttggggttgttgaggcttgtcattcccttggggtcatgcatagagatctcaagcctgaaaactttctcttggtcaacaaagatgatgatttctctcttaaagcaattgactttggcctctctgtattcttcaaacccggtcaagttttcactgatgtagtcggcagcccatactatgttgctcctgaggttctcctcaagcattatgggcctgaagcagatgtgtggacagctggtgtc

SEQ ID NO: 13206 - DNA, 279 bp, Glycine max
  Clone ID: 701066767H1
cactcgagccgaatcggctcgagctgctcgtgcctctagggttatcacatctccatttccattacctctctctcagtttccaagcatcttaagctatgggaaagtcttacccaaccgtgagcgctgattaccagaaggccgttgagaaggcgaagaagaagctcagaggcttcatcgctgagaagagatgcgctcctctaatgctccgtttggcatggcactctgctggaacttacgacgtgagctcgaagaccggtggtcccttcggaaccataaagc

SEQ ID NO: 13207 - DNA, 274 bp, Glycine max
  Clone ID: 701066768H1
cagaaatagaggatggtgattttcttgtttgtcttgttattcacaatattgatggacctggattaagggactctgaaacccaacgatatcttgctcgactagctgcttgtgcacggattcgtgttgttgcctctattgaccatgttaatgctcctctgttttgggacaagaatatggctcatacacagttcaattggtgctggtatcacgttcctacttttgctccttacaaggtggaaggcatgttttatcctatgattcttgcacatggtag

SEQ ID NO: 13208 - DNA, 277 bp, Glycine max
  Clone ID: 701066769H1
ccaaagtgcttctctcctctgtctttttctctctcttgctatccttttcggctagttcgcactgctgcaagtgcaactccaagaagcgcagtgccaagccaccatgtttcaacattcaacagaagcctttttccttccacttttctctttggacttggttcttctgcttaccaggcagaaggagcagcaagtgtagatgggagaggaccaagcatatgggacacctacactagacagcatactgaaaagatttgggatcatagcaccggtgacatgg

SEQ ID NO: 13209 - DNA, 275 bp, Glycine max
  Clone ID: 701066771H1
tcagaaccctcgctcctcgccagaaattgtattgcagaggaaagaccgagaaaaaagaagaaggaattttgatggtaaagtaatattctaatttccaaaattcgattttgttgccgaaggaagaaaagaaggaaatgggaggttcatcggatacgaagctcctgcaagacctgttgttgtacgcagcgagcgcagcgctgagttgcttggtactattcgcgggtttgagacacctggaccctaatcgcgaacatcgaagaaggctctcgagcaca

SEQ ID NO: 13210 - DNA, 273 bp, Glycine max
  Clone ID: 701066772H1
ctcccaccgaccaaaacgcgcaacacgttgtaattaaaacgacaccgaaactaatgggcgtcttcagcgaaaacccgaatccggacccggttgtgatccgccaggtttgggcttcaaatctcgaatccgaattccaactcatccgcgaactcatcgaccactatccttttatctcgatggacacacaattccccggtgttgttttccgaccacacctggaccccacaaaaccctacaaccaccgcaacaacaatcgcaaccgccactccgacc

SEQ ID NO: 13211 - DNA, 272 bp, Glycine max
  Clone ID: 701066773H1
gcagtaatggcttcaatgaataaccaaaaagaaattgagctctttgagggccaatctcttctgtacatgcagctatatgggcacctaagacctatgtgtcttaagtgggctgttcaactaggtattccagacataatacagacccatgccaaacccatttctctttctgacttggtctctactcttcaaattccaccagctaacgctgcctttgtgcagcggttcatgcgcttcttggcacacaatggaatctttgagatccatgagagcca

SEQ ID NO: 13212 - DNA, 274 bp, Glycine max
  Clone ID: 701066774H1
acacaacatccgagcctttaaaaccattcctgaagagtgcgttgaaccaacaaaggactacattaatggcgcacaatttagatcagactctaaaacagttaaccaacaagctttcttttatgctagtgaacgcgaagtccatcacaacgacatatttatattcggcatagataacaccgtactctctaatatcccatactatgaaaaacatggatatggggtggaggaatttaatgaaaccttatatgatgaatgggttaacaagggcgacgca

SEQ ID NO: 13213 - DNA, 274 bp, Glycine max
  Clone ID: 701066776H1
tgcagagtactacagaattattaatggcctgaatttcgaagacaaacttcatccaggtggtccatttgacccattggggcttgcaaatgatccagaccaagctgcactgctaaaggtgaaggaaattaaaaatggaagacttgctatgtttgccatgcttggtttctacttccaagcttatgtcactggagaaggtcctgttgagaaccttgcaaaacatctcagtgacccttttggcaacaacttgctcactgtcatttctggatctgctgag

SEQ ID NO: 13214 - DNA, 274 bp, Glycine max
  unsure at all n locations
  Clone ID: 701066777H1
caaaaccattgttcgcaatcaaaaagtgacagttaatattctctaaccaaccgaaattaatttccatacactaaacaatatccaaantgattaacggagaaaagaaaatggagaaagaaggtgttgggcttgaaatcactactgagcttcggttgggccttcccggtggggattaaccctgacaagaacgagaagatgaagaagagggtgttctcggagattaatcaaggtgatgaaaacagctcctccgaagaagatcgcaaaatccaaacca

SEQ ID NO: 13215 - DNA, 274 bp, Glycine max
  Clone ID: 701066778H1
gcacatttgatggagatccaagttaatggtgggacagttgaccagaaggtggactatgcatatagcttcttcgagaagcaaatcccagtggatgctgttttccaaaaagatgagatgatagatatcgttggagtgactaagggtaaaggttatgaaggtgtcgtaactcggtggggcgtcactcgccttcctcgaaagactcacaggggtctaaggaaggttgcttgtattggtgcctggcaccctgctcgtgtttctttcactgttgccaggg

SEQ ID NO: 13216 - DNA, 280 bp, Glycine max
  Clone ID: 701066779H1
gttctagatcgccgcggccgatctttgtttgttccatctcttgcttcttgcttctattacttgcttctttcttcaccatgtcacttgctgggaaaatcaccactgaaattggggttcatgcaaccgctgcaaagtggttcaacctctttgcaacacaacttcatcatgttcaaaaccttactgatagagtacatggaaccaagctgcatcaaggtgaagactggcatcacaacgagacagtcaaacactggacttataccatagatggtaaggctacaac

SEQ ID NO: 13217 - DNA, 194 bp, Glycine max
  Clone ID: 701066780H1
tgtgaccaacacattcgtgcaaggaaaaccctttcttccagttgcagcagctcccactaaaaatcaggttcggagagcggttcagtgcggtgtgtggtgcaagaagaaggagatacacccgcaattctacgaggaatcgaaggtgtactgcaacggggagctggtgctgacgacaggtgggacccagatggaat

SEQ ID NO: 13218 - DNA, 280 bp, Glycine max
  Clone ID: 701066781H1
cttaagcttgctactgagtttccacactgcataccttagggtcttccgaattcgatcttaatttgcaagatggctaaggaaaaggctcagatcaacattgtggtggttggtcatgtggaccctgaggaggcaaccaccattaacgagctgaagaagcctgttgtggagaaagaagctccagggcatgccatatgagggcatgcacgtacggcctcggaggggaaccagaaaattatgttaacaaaataatctggaaccctaatgtatcagtgtcatcatc

SEQ ID NO: 13219 - DNA, 278 bp, Glycine max
  Clone ID: 701066782H1
cggccgtttgctccccaaggaaagaagcagagtgtttcttttgaaatcagctagaaaagatgtcaggtgaagaggtagctgttgcagctgaggcacctgctgcttcaattccaggtgagcccatggacatcatgactgctctacagcttgtgctgagaaaatctctggcctatggtggtcttgcacgaggtcttcatgaaggtgctaaggtgatcgagaagcatgctgcacagctctgcgttctagcagaagattgtgaccaacctgattatgtgaaa

SEQ ID NO: 13220 - DNA, 275 bp, Glycine max
  Clone ID: 701066783H1
aatctcacaactctcgtcgtcgccgcactgcaccgcaccgcaccgcacgtaagcacccactcagatgaagaagggagtccatccacagaagcaatggatatcctacgttacacaaacgggtaggttgatgcatgtgatgatgacaaagatacaccctgttgggaaggtttatcacttccgggctaagcgtcaaatggccgagagtttaggacagattgctaagttcagacgccgctttgggctagaaaatccagagggcaatgaaaaatgacagc

SEQ ID NO: 13221 - DNA, 273 bp, Glycine max
  Clone ID: 701066784H1
cgcgagacgaagaacagtgtggttcggattggggaaggccaaccaagcctaataactatttggttcagcagcaacaggttaaggttcagagtagagcgcgtgagtttgggcacgagagtgtgaatgcgaaatgcactcgtccatctgcgtggccccctttgcaagttcagcagcaaaacaaccgggtacagtttggcggatccgggtctagggttggtggatcttctgtgaaaagggggtgtggtggaactggggtgttcttgcctcgccatt

SEQ ID NO: 13222 - DNA, 276 bp, Glycine max
  Clone ID: 701066785H1
cacgaggaccagcctcaggaggacaaggatgtctcacaggaagttcgagcacccaacgcacggttcactgggattccttcccaggaagcgtgctgctcgtcacaggggaaaagtgaaggcattccccaaggatgacccatccaaggcacccaagctcactgcattcttgggttacaaggccggtatgactcacattgttagagaggtcgagaagccaggatcaaagcttcacaagaaggaaacttgtgagcctgttacaattattgagacccctcc

SEQ ID NO: 13223 - DNA, 275 bp, Glycine max
  Clone ID: 701066786H1
ctcgtgcctctagggctatcatatctccatttccatttcctctctctcagtttccaagaatcttaagctatgggaaagtcttacccaaccgtgagcgctgattaccagaaggccgttgagaaggcgaagaagaagctcagaggcttcatcgctgagaagagatgcgctcctctaatgctccgtttggcatggcactctgctggaacttacgacgtgagctcgaagaccggtggtcccttcggaaccataaagcacccctccgaactcgctcacgg

SEQ ID NO: 13224 - DNA, 275 bp, Glycine max
  Clone ID: 701066787H1
gagagaaagaaaaaaggggaatttcaatggcgtcaagggtttctctgaaggcgaaggggaagagttcaaagggatcgaaggctgcggaagatcgatccgcgagcgagtgcctgaaggagtggacgacatgggcgatgcgaaaagcgaaggtcatcactcactacggtttcatccctttggtcatcgtcatcggtatgaactctgaccccaagcccccactttcccagcttctcagccccgtctgatccacctcttcaattcttccaccatcaacg

SEQ ID NO: 13225 - DNA, 271 bp, Glycine max
  Clone ID: 701066788H1
aattatacataaattttggacttcgcacgtagctagctacagaagacaaaggagccttgagtctcgagatcttgtcagatcggaacgcaaccgcaactgccaccgagattgctttgtgtgttatggccagggaagttactggcatacaggttatggaaaagaagccaaatggtgccatagcggcttcaaatggcagtttaagtgatagaatgcgtgtttctcccaaaattgcagcaatggttcaagcaatggatcatgagataaaggaatc

SEQ ID NO: 13226 - DNA, 259 bp, Glycine max
  Clone ID: 701066789H1
gtgctggccagactagggttagggattctgatcgatgtgagatgttccctgcattgatgataccgctcgcgcgctgctggaagccgttcgggcaaggtgacgatgccgctaatgccgccgcagtcgccggaagtcattgcaaggacggcctcctccagttccgcgatatcggaaacttcgccgccggcgaatttctccatggccgtcgtccaggccaatcatgtcctcgagcgacagagccagatcgagtccgtcgcct

SEQ ID NO: 13227 - DNA, 274 bp, Glycine max
  Clone ID: 701066790H1
atatgaagttgtttgtcttctttgttgctgcagtagttttggtagcatggccatgccatggcgcaggctaccaaaggttccctctccgaatgaaaactggctatggtgagcgttcttcggaggtaaaatgcgcaagttttaggcttgctgtggaagcacacaacatccgagcctttaaaaccattcctgaagagtgcgttgaaccaacaaaggactacattaatggcgaacaatttagatcagactctaaaacagttaaccaacaagctttctt

SEQ ID NO: 13228 - DNA, 271 bp, Glycine max
  Clone ID: 701066791H1
ctcaagcattgcatccctcttgatttgtagtttgttttgcgctttacataaaagttctgccaaatcaagaggggttttaagatcatagtgtgtgtcttgcaacaatggctaagttctttgctgctatgatcttggcagtctttgccatctccatacttcaaacagtggtaatggctgctaatggacatggaggccacttgtatgacaacaagagcaaatatggaagtggaagtgtcaagagttaccaatgcccatcacaatggtcgaggag

SEQ ID NO: 13229 - DNA, 271 bp, Glycine max
  Clone ID: 701066792H1
cctcgagccgaatcggctcgaggagatctcaatacattcctgaggaacccaggagcaccatcacgaactttttccgcattccactcaacatttttgtgtgtgttgtgctgtacaatgttgatgcattccctatcactgttatgtttggcatgtgctcaattttccttttggtggcttgtatcttgcaaaggcgactgatggtgatttccgataagccaaaaacagaagattggcaattgaaggatagggacgcagagtcagaaccattgaa

SEQ ID NO: 13230 - DNA, 274 bp, Glycine max
  Clone ID: 701066793H1
ctgagaactaacaaggagaagcaaatggcttcctcaatgatctcttccccagctgttaccactgtcaaccgtgccggtgccggcatggttgctccattcactggcctcaagtccatggctggcttccccaccaggaagaccaacaatacaattacctccattgctagcaacggtggaagagtgcaatgcatgcaggtgtggccaccagttggcccgaagaagtttgagactctttcctacctgccagaccttgatgatgcacaattggcaaagg

SEQ ID NO: 13231 - DNA, 278 bp, Glycine max
  Clone ID: 701066794H1
gtggcgcagtggctcagttactctttcaaaaccctgaaaatccaaaatcagccatggtttcaaatggtaggatgctgtgttcaagcttgattacagcacctccgtcatcctccctctccagaactactccatcctacttctgctcatttccttctcgtagaatcatcttcacgccaagaattggatcatctccggccccggcccatgcccaggcccagcccaaggaagccaagctctggggtggcaggttcgatgagggcgtaaccgacgttgtggag

SEQ ID NO: 13232 - DNA, 277 bp, Glycine max
  Clone ID: 701066795H1
gttttctttcttcttcaacataacatgcactacgcaattgcctcatgaatcatcattagtcagggtttatcctctaacccaataaacatactatagcaatgagtgcgtccaggttcatcaagtgtgtcactgtgggtgacggtgccgttggcaagacttgcatgctcatctcctacaccagcaacacttttcctagggactaggtgccaactgtctttgacaatttcagtgcaaatgtcgttgtggatggcagcactgtgaatcttgggttgtggga

SEQ ID NO: 13233 - DNA, 221 bp, Glycine max
  Clone ID: 701066796H1
gctgtggctaatcatccaattaaagggttttacttcatggtagctggttcacctgagagtctcaccatgacgatcatgagctacatgggaaagataagaattgcatttggagtagagaagaacttcatcgacaagcaattattcaagtcgtgtttggagaattctcttgagatgataaaggaagcagcaaaaaagattcccgcataaaatcaaatagggaa

SEQ ID NO: 13234 - DNA, 237 bp, Glycine max
  Clone ID: 701066802H1
tcacactgtgctgtgcttatttggcgtacttaagagattagcaatagaaagtgaaagacaatgagtcgaggaagtgcaactgctgcgaagggcaagaagaagggtgcgacattcaccattgactgcgccaagccagtggaggacaagatcatggacatcgcgtctctcgagaagttccttcaagagacgattaaggttggtgggaaggccggtgctctcgccgacaccatcaccgtc

SEQ ID NO: 13235 - DNA, 240 bp, Glycine max
  Clone ID: 701066803H1
aaggggcagtagccgagattccgtgagttgcaaaaatgaagacgattctttccaccgagaccatgaacatcccggacggcgtgagcatcaaagttcatgccaaggtcatcgaagttgagggcccccgcggaaaattggtgcgagacttcaagcatttgaatctcgattttcagctcattactgacgaaaacggtaaaagaaagctgacaatcgacgcgtggtttggttctcggaaaacat

SEQ ID NO: 13236 - DNA, 252 bp, Glycine max
  Clone ID: 701066804H1
gtcagttgcaggaaaaatggtttcgctgaaactgcagaagcggctcgcagccagcgtcctcaagtgtggcagaggaaaggtttggcttgaccccaatgaagtcaacgaaatctccatggctaattctcgccaaaacataaggacgctggttaaggatgggtttattatcaggaagcccaccaagattcactctcgctcaacgtgccgccgaatgaaggaagcccagaggaaaggacgtcaatctggatatgg

SEQ ID NO: 13237 - DNA, 91 bp, Glycine max
  Clone ID: 701066805H1
ttctaaactaacaaggatttcagttaggaaggatacaacttttgagatgtggcataatttttattagataacgtttgtcttacttttacct

SEQ ID NO: 13238 - DNA, 259 bp, Glycine max
  Clone ID: 701066806H1
gtttgttgtgagctataagctagtttatcgtgaggagaatatgaagttgtttgttctctttgttgctgcagtagttttggtagcatggccatgccatggcgcaggctaccaaaggttccctctccgaatgaaaactggctatggtgagcgctcttcggaggtaaaatgcgcaagttttaggcttgctgtggaagcacacaacatccgagcctttaaaaccattcctgaagagtgcgttgaaccaacaaaggactacatt

SEQ ID NO: 13239 - DNA, 258 bp, Glycine max
  Clone ID: 701066808H1
agaagctagtagtacttggatgggaagtgcgtccatgtcagctctgatcgcaacaaaaggcggaccccccgtgccgatccaggctcgaataccggtcttggcgagagggtaccgataactaacttccataagatccaactcctcccttatcaaacgactcgtctcgatttcctcaaacgccagctccggattcgcgtggatcttccgccgaatattcttcaaccactccgccgtctccgcgcgccgggccacgctcag

SEQ ID NO: 13240 - DNA, 241 bp, Glycine max
  Clone ID: 701066809H1
taaaaatcatatactctttctttaataaagtgctagtccaatgagaaaaaaaggaaatggaaagtgaaattctcctaagcttgcccgagtaaatatgaaagcatataggtcttttttttatcaatcgtatatggataggtctagttcaaattgtgtaaataataataagggttaaataggtttttattcctttaaaattgagtattttttttaatcctcaaaaaaactagtgtgaatgtac

SEQ ID NO: 13241 - DNA, 254 bp, Glycine max
  Clone ID: 701066810H1
cacacctgacacctgatccgcgagcgagggtttgtgaagatgacgacgattcgcaggttttgctgcaacgatcttcttcgctttgccgccgtcaatctcgaccatctcaccgaaacattcaacatgtccttctacatgacctatcttgcaagatggcctgactatttccacgttgccgaaggccctggaaatcgaatcatgggttacattatgggtaaagttgaggggcaaggagaatcttggcatggccatgt

SEQ ID NO: 13242 - DNA, 255 bp, Glycine max
  Clone ID: 701066811H1
gaaagtcttccatagccccccaaaaatgaagagcaccatcttctttgctctctttctcttttgtgccttcaccacctcatacctaccttcagccatcgctgatttcgtgctcgataatgaaggtaaccctcttgaaaatggtggcacatattatatcttgtcagacataacagcatttggtggaataagagcagccccaacgggaaatgaaagatgccctctcactgtggtgcaatctcgcaatgagctcgacaa

SEQ ID NO: 13243 - DNA, 99 bp, Glycine max
  Clone ID: 701066812H1
gattgcatcagtattgtgatggaaggaacatgaacagaaacacgatcgattgatagtctcattcggggttagaaatgtgacatttccatggatgataac

SEQ ID NO: 13244 - DNA, 183 bp, Glycine max
  Clone ID: 701066813H1
gatccagcaaagctgaaagacatgaaaagagaggaggagattgcgaaggcaaagcaggccttggaaagaaagaagaagttagcagagaaagctgcagccaaagcagccatcagagcacaaaaggaagctgagaagaagcttaaggaccgtgagaagaaaccaaagaagaaatcaggtcgcgca

SEQ ID NO: 13245 - DNA, 159 bp, Glycine max
  Clone ID: 701066814H1
cctcgagccgaatcggctcgaggtttcctttcattttccctcactctctcgctccccaaacacccctctctctcctccaatacccgaccagctcaccgacgaccagatcgccgagttcaaggaggccttcagcctcttcgacaaggacggcgatggttg

SEQ ID NO: 13246 - DNA, 159 bp, Glycine max
  Clone ID: 701066815H1
cacagagtgagatatagaatcactgaagagcttccttcaatggcggtttcttctctctctgttactcctctttcgctctcaaattcttccccctctctatcttccaagccaaagtttccatctttgtgttttctctctggcaacaacaccacattgagg

SEQ ID NO: 13247 - DNA, 196 bp, Glycine max
  Clone ID: 701066816H1
gtagtcttcaatttcattttcaacctctgttctcataaaaccctagaaacattcaaacaaggatgtcttgttgggcatgcaaaaaatgcacctttgtgaatctcccttctcaaaaaggggaatgcgaaatctgcttttcccccgcgtccccattgtcaatgggtccttcttgttcttcgtcgcccccaaaatggtc

SEQ ID NO: 13248 - DNA, 152 bp, Glycine max
  Clone ID: 701066818H1
tgtaatgatttcacctttctcaatatcaccaacatttaccagatacaatttaaagtgtaattttaaaacaggcacacgatgcaacaccagtccgctgataggtgaaaaaacaccaaatgcccccccagtccattctaagtccattacccgtt

SEQ ID NO: 13249 - DNA, 218 bp, Glycine max
  Clone ID: 701066819H1
cctcgagccgaatcggctcgaggcatcggaagacaccctagccactctcccggcgtcacgaaccagatcttcgtgaaaaccacaacgggtaaaacgatcacgttggaggtggagtcttcggacaccatcgacaacgtgaaggccaagatccaggacaaggaaggcatccctcgggaccagcagcgcctcatcttcgcggggaagcagttggaggacgg

SEQ ID NO: 13250 - DNA, 245 bp, Glycine max
  Clone ID: 701066820H1
ggaaagcacgtgcctcgtgcgattcttgtagatctcgagcctactgtgattgatgaagttaggactgggacataccgccaactatttcatcctgagcagctcattagcggaaaggaggatgctgcaaacaactttgcccgtggccactataccattggaaaggagattgtcgaactttgcatggatcgcatcagcaaagcttgctgacaactgcactggtctccaaggtttcctggtttccaatg

SEQ ID NO: 13251 - DNA, 255 bp, Glycine max
  Clone ID: 701066821H1
cgcgaaattagggttgatcgaggaagaagaagaagatgtcgtacctgttgcctcacttgcactctgggtgggcggttgatcaagcaatcctggcagaagaggagcgtctggtcgtgatccgtttcgggcacgactgggacgaaacctgaatgcagatggacgaggtgttggcgtcggtggcggagacgataaagaactttgcggtgatatacctggttgacataacggaggtgccggatttcaacaccatgtacg

SEQ ID NO: 13252 - DNA, 246 bp, Glycine max
  Clone ID: 701066822H1
atcgagccgctttctcgtctcgtatcacagtagtagtatctatcccatcattcccacttcacaatatgggatgctgcataatctccaggctcaagatccaacccatatggttcgcgcttctctttattgtgggattgttaacgattctcaaattggcattcgttgtgctcagattggtctacgtcaatttcctcagaccaccgaggaatctcataaagtacggatcttgggccgtggttactggac

SEQ ID NO: 13253 - DNA, 187 bp, Glycine max
  Clone ID: 701066824H1
gtaactggcaaagacaccaacaccccttatctctctctgtccaattctgacctcaagttctgttggatcttgcatatagttaccgtttattgattcgcaaagatgaaggtcacagtggtttctcgaagtggaagagaagtggttaaaggtggcattgagctcagcgattctgctactgtagcagatt

SEQ ID NO: 13254 - DNA, 254 bp, Glycine max
  Clone ID: 701066825H1
atttaatgaaaccttatatgatgaatgggttaacaagggcgacgcaccggcattgccagagactcttaaaaattacaacaagctgttgtctcttggcttcaagattgtattcttgtcaggaagatatcttgacaaaatggccgtaacagaagcaaacctaaagaaggctggcttccacacatgggagcagttaattctcaaggatccacatcttatcactccaaatgcactttcatacaaatcagcaatgagag

SEQ ID NO: 13255 - DNA, 253 bp, Glycine max
  Clone ID: 701066826H1
ggagactagggataagattgatgaaaaggagagggaaattaagggttacagacagaaggttgaggaattggagaaggttgctgcagagaaaaaaactgaattggatgagttggttaagcagaaattaaggttggaggaggcacttagagaatctgaggagaaagtgactggtctggaatcgagtattcttcaattgcgcaaggaagcaaaggaagctgagagggtgatcatatcgctgaatgagaaggcggtg

SEQ ID NO: 13256 - DNA, 251 bp, Glycine max
  Clone ID: 701066827H1
ctcacttgcaatcaatgaagcccgaaaggatggtattcgaattagataccatgatggccatctcaaatccctgcttcatgcgatcaaagatagagttaatgtgaagggctactatatatggtcattttcagatagctttgaatgggatgctggttacacagctcgatttggcatcatatatgtggattacaagaacaatttgagtagataccctaagtcctctgcgttttggctgaaaaaattccttctca

SEQ ID NO: 13257 - DNA, 253 bp, Glycine max
  Clone ID: 701066828H1
gcagcacagaagagggaaaacggcaccgccgccgtagaagaaaacaaccatggtgcacgtctccttttacaggaactatgggaagacattcaagaagccgcgtcgtccgtacgagaaggagcgtctcgacgcggagttgaagctggttggtgagtacgggcttcggtgcaagagagagctgtggagggtgcagtacgcgctcagccgcatccgcaacaacgcgcggaacctcctcaccctcgacgagaagaac

SEQ ID NO: 13258 - DNA, 107 bp, Glycine max
  Clone ID: 701066829H1
cgctgaactcatcacttactggaagccttgttgtgagtaagagaaaaggcttcctgcaccgagcacaccaacttgatacctctgattctttctttgcttagaattcc

SEQ ID NO: 13259 - DNA, 205 bp, Glycine max
  Clone ID: 701066830H1
cgcgaaattagggttgatcgaggaagaagaagaagatgtcgtacctgttgcctcacttgcactctgggtgggcggttgatcaagcaatcctggcagaagaggagcgtctggtcgtgatccgtttcgggcacgactgggacgaaacctgcatgcagatggacgaggtgttggcgtcggtggcggagacgataaagcaactttgcgg

SEQ ID NO: 13260 - DNA, 147 bp, Glycine max
  Clone ID: 701066831H1
cactcattaattgcaagaatggcacttcgttgcttggtgatgtccctttctgttctcttcactcttggtcttgcgagagaaagccatgccagagacgaagatttttggcatgctgtttggtcaaacactcccattccaagttcattg

SEQ ID NO: 13261 - DNA, 232 bp, Glycine max
  Clone ID: 701066832H1
tgttgaattaacatataattatggggttacctcgtatgacattggcgatggctttggacattttgcaattgcaactcaggacatttataaattggttgagcacatcagggccaagggtggaaacatcacaagggaacctggtccagttcaaggtggaactactgttatcgcctttgttaaggatcctgatggttatacttttggacttatccaaagacccacagtccatgac

SEQ ID NO: 13262 - DNA, 218 bp, Glycine max
  Clone ID: 701066833H1
ctcgcctctctctccaattcctccgttgacttagacttgaacaacaacaaccactctgtctccgtttcttctttccttaaccaacctctttccacttttctcactctcacttctacttcctcttcctcctctgtctttcacaaacatgaccactctcttctctctggtctccgaccccaacaccctgcaagatccacggcatacgcgtgtgattcaga

SEQ ID NO: 13263 - DNA, 206 bp, Glycine max
  Clone ID: 701066834H1
tcggcagttagagacagagagagagagaaacaaaaccctaattggtgagtggcgaaaatggcgcaccggcggcggcagcagcagcaacaggagcagcagtaatcgagcaagtgcagtgcttcgggcggaagaagacagcggtggcagtgagctactgcaagcgtggtcgaggcctcatcaagatccatggctgccccatcgaactg

SEQ ID NO: 13264 - DNA, 185 bp, Glycine max
  Clone ID: 701066835H1
cgagcagccacacctcccgcagcagccatggttctcaaaactgaactatgccgattcagtggtgccaagatctacccaggaaagggcatcatatttgttcgttgtgattcttaggttttgccgtttgcaaactcagaatgtaagaggtatttccacaatcgcctgaagccttcacagctcacctg

SEQ ID NO: 13265 - DNA, 172 bp, Glycine max
  Clone ID: 701066836H1
aatgtaatggcagagcaaactggtgcagagttgattgatcgatgattgatgatggttcgcgcgtcggtgaacgtgggttccgccaagttcgtagtgatctgcgtggggcttttaggcttcgctctcgtcgccgactttctatgggcatctacctcttccactcttcccacct

SEQ ID NO: 13266 - DNA, 247 bp, Glycine max
  Clone ID: 701066838H1
atcattctcatattattgtcgccacttcgacctcaatcaccctcgcgccctcgctcttcccttcctggtggcgacaatgtcgactcctgctaggaagaggctgatgagagacttcaagaggctgcaacaagacccgcctgcagggatcagcggtgccccccaggataacaacataatgctgtggaatgctgtcatattgggtcctgatgatactccatgggatggaggcacgttcaagttgactctc

SEQ ID NO: 13267 - DNA, 130 bp, Glycine max
  Clone ID: 701066839H1
cgagataactagaaacagtgtgatgaaaatgaaggtccttgttctcttcgttgctacaattttcgtagcatggcaatgccatgcgtacgatatgttccctctccgtatgaacactggctatcgtgcccgt

SEQ ID NO: 13268 - DNA, 252 bp, Glycine max
  Clone ID: 701066840H1
aaaaattggagtccagtgaactgggaggaaaccttcaatacgtttccatcaaagctccatccaaacaccatagtgcacaactggttgggccctggtgtttgtccaaaggttgttgcaaaaggtttcaggtgcatttacagtaatcagggtgtctggtatcttgaccatctggatgtaccttgggatgaggtctacactactgagccactacagggaatacatatagcttctgaacaagagcttgtaattgga

SEQ ID NO: 13269 - DNA, 193 bp, Glycine max
  Clone ID: 701066841H1
gggaatagtgctgcaatggcttcaagtcaggaggaggtgacccttttgggagctactggaagcccatttgtgtgcagggttcatattgccctcaagttgaagggagttcaatacaaatatgtcgaagaaaatttgaggaacaagagtgaactgcttctcaaatccaacccagttcacagaaggattcagggtt

SEQ ID NO: 13270 - DNA, 180 bp, Glycine max
  Clone ID: 701066842H1
gtaagtcggattatctccgaaaactttttgagaatagagatagagagagagagatgaaatgggtaaggggggaatgtcaattgatgaacatggagcaggcaaagaagagaatatggctgcatggcttgttggaataaactctctcaagattgcagcctttcaagcgtactactttgggac

SEQ ID NO: 13271 - DNA, 251 bp, Glycine max
  Clone ID: 701066843H1
ccaaactcagaaccaaactcagaaccaaactcgccaaaactagggttttgcattgatggcactgtgcaaccgcgtcagatcgggaatctctctcttcaccaaatccacgttccttacttcccagcgatccagtctccaacgatccctcgttgcccctttcatttccctcgcctccagaaattacgccaacgtgccggggcaaaaggaaaccaaagttaaggtccctctggctttgtttggaggttcaggaa

SEQ ID NO: 13272 - DNA, 238 bp, Glycine max
  Clone ID: 701066844H1
gagagagagagggagtcagagaaaccctaggtaagaagaaaagatgccggctggtcatggtttgagatcccgcaccagagattccttctctcgtcctttcaggaagaagggaaccatcgccctcaccacatacctgagaacctaccacgtcggcgactatgctgacgtcaaggttaacggtgccgttcacaagggaatgccccacaaattctaccatggccgaacgggacgcgtctgg

SEQ ID NO: 13273 - DNA, 215 bp, Glycine max
  Clone ID: 701066846H1
gtggtttaatgatgtgcattcaactgaaatctctgataaatgtgatgaagcacttaatctgctgtctaaggcgcatggttgtgaaatgatagaaattgttataccagagcttcttgagatgcgaactgcccatgttgtttccattggctctgaatgcttatgttcactgaatcctgattgtgcagacgggaaaggtgtaaattcgacatatgata

SEQ ID NO: 13274 - DNA, 216 bp, Glycine max
  Clone ID: 701066848H1
attttctcacttctcagcactcagcagcgatatcagttgaagaaacagaaacaaacaaaagaggcagaagatgttgtgggtggacaaatatcgtcccaaaaccctcgaccaggttatggtccacaccgacatcgctcgcaatctcaagaaattggtaacggaacaggattgcccccatttactcttctatggcccatctggctccggcaagaaaac

SEQ ID NO: 13275 - DNA, 212 bp, Glycine max
  Clone ID: 701066849H1
catttttctcctttctgtgttttcaagcaatctgttttttaacctctatttatggggttgtttttcttcctagtctagtctccctttgtgttttgtaatttaatgtagtttgtagttcattagatgctgtgcaacagaacatgcacaatatggtgtatcaagtatcaagatgccatagaaacacctggtttgggggtaaaaaaacacccccc

SEQ ID NO: 13276 - DNA, 181 bp, Glycine max
  Clone ID: 701066850H1
tttgagagttagaatggctgctgctattgaaatccccacaatagtgtttccaaactcctctgcccaacagaggatgccagtggttggaatgggatctgcccctgacttcacatgcaagacagacacaaaggaggctatcattgaggccgtgaaacagggttacagacacttcgacactgct

SEQ ID NO: 13277 - DNA, 255 bp, Glycine max
  Clone ID: 701066851H1
gttaggtcttccgaattcgaagttaatttgcaagatggctaaggaaaaggctcagatcaacattgtgcgtggttggtcatgtggaccctgaggaggcaaccaccattaacgagctgaagaagcctgttgtggagaaagaagctccagggcatgccatatgagggcatgcacgtacggcctcggacgggaaccagaaaattatgttaacaaaataatctggaaccctaatgtatcactgtcatcatcagtgtgtag

SEQ ID NO: 13278 - DNA, 253 bp, Glycine max
  Clone ID: 701066852H1
aaatgactcaagcccagattcaaccagttaaacttggaacccaaggctttgaggtactattaactacattacttgctcttattttgataattgatacaattaatctcattctaggtttcaaaattgggattcggatgtatgggccttactggagcgtacaatgaccctctccaagaacaggatggcatatctgttatcaagtatgcgttcagtaagggattcacattttttgatactgcggatgtttatggag

SEQ ID NO: 13279 - DNA, 252 bp, Glycine max
  Clone ID: 701066853H1
ctaagatccgccttctctgaattgtaaaaatgtcgctcggagaaactgcttgttcatacgcagctctcatccttcatgaagatggaatcagtgtaactgccgacaagatcagcaccttgttggaaactgcaaaggttcaagtagatacctattggccaaccttatttgctaaacttgctgagaagaaaaatcttggcgatttgatagccaatgcagcaggcggtggtgcaccagttgctgttgcagctgccc

SEQ ID NO: 13280 - DNA, 254 bp, Glycine max
  Clone ID: 701066854H1
attgagggagaagagaagttttgtgcaaaatccttgggaacagtaattggttttgccatttcaaagctgggaaagaacattcaagtactttcaagttcctttgtcaataagcaagaccaatacactgtggaaggagtgcagaatcttggagacaaagcagtgatgtgtcataggctaaatttcagaactgcagtattttactgccatgaagtccgtgaaacaacagctttcatggttccattggtggctggtga

SEQ ID NO: 13281 - DNA, 234 bp, Glycine max
  Clone ID: 701066855H1
gctggttgcttccattcgcgatggcgttgcaggagaggctagacaagttcaagaaacagcaagacaagtgccaaacgacactttcgaccattgcagctaccaaggccgccgcggcaacccaaaagtccgccacacatgcctcggcaaatggaagacacgctgcccctgcggttaagttttccaacgacaccgagaggcttcagcatattaatagcattcgcaaggccctgtggt

SEQ ID NO: 13282 - DNA, 253 bp, Glycine max
  Clone ID: 701066856H1
cacttgggaagagggcttgaagaaaaccatggactggtatatcaacaatcctgattggtggggtgatgtcagtggtgcattgcttccccatccaaggatgctgatgatgcccggtggactggagagacattttgatggatctgacgaagaaaaacctccatcgtatgtctcaactaatactcgaatggtggttccgacatccaagaatgttaactcctcacagaaacctgctctcaagttcttgctctatggc

SEQ ID NO: 13283 - DNA, 247 bp, Glycine max
  Clone ID: 701066857H1
cttctctgttctcctagaacttgattacttgaacattccctatgacagatgaggtggttcttctggatttctggccaagtccatttgggatgagggtcaggattgcacttgctgaaaagggtatcgaatatgagtacaaagagaggacttgaggaacaagagtcctcttctcttacaaatgaacccggttcacaagaagattccggttctcatccacaatggcaaacccatttccgaatccctcatt

SEQ ID NO: 13284 - DNA, 250 bp, Glycine max
  Clone ID: 701066858H1
aaaacattgagaaagcctcaaaattgttctttgcacagagtgcggaggaaaagagaaaggttagcagaaatgagagctctccagcgggttattatgacacagaacacaccaaaaacgttagggactggaaagaagtctttgattttctagccaaagaacccactttcattcctgtcacttctgatgaacatgatgatcgagtcaatcagtggactaatcaatcccctgaataccctctaaactttagggt

SEQ ID NO: 13285 - DNA, 249 bp, Glycine max
  unsure at all n locations
  Clone ID: 701066859H1
gctcttccacccccgtaccgactttgnctctctgcaatccacagccgaaaatgcctttcaagaggtacgttgagatcgcgagggttgctcaaatcaactacggcaaggaatatggcaggctcgtcgtcatcgtcgacgtcattgaccagaacagagcacttgtcgatgcccctgatatggtgaggtcccaagtcaatttcaaaaggctttcccttaccgacatcaagattgacatcaagagggtcccta

SEQ ID NO: 13286 - DNA, 217 bp, Glycine max
  Clone ID: 701066860H1
ctcgagccggtgtgattgtctgttgttgtaactcgttcttcttcttttgttgttctgtgttcgtgtttgttctttctctcacctgaaaatgtcttgctgcggtggtaactgtggttgcggaagctcctgcaagtgcggcaacggctgcggaggctgcaagatgtacccagacttgagctacactgagtcaaccaccaccgagaccttggtcaatggg

SEQ ID NO: 13287 - DNA, 179 bp, Glycine max
  Clone ID: 701066861H1
ctttatagaaatgatgagttttgtcagtgggttacaagactggaacatcagctaactgcattgtcgtggtttacaattggtggcaagacatttgattattctgcatggaaaaaattggactgcataccaaaaaaaggatccggagtaggatttggtagttttcgctttgctgcacaaaa

SEQ ID NO: 13288 - DNA, 172 bp, Glycine max
  Clone ID: 701066862H1
ccgagaggaaggccgcggagttgaccaaaattattgttggggttgttgaggcttgccattcccttggggtcatgcatagagatctcaagcctgaaaactttctcttggtcaacaaagatgatgatttctctcttaaagcaattgactttggcctctctgtattcttcaaacc

SEQ ID NO: 13289 - DNA, 170 bp, Glycine max
  Clone ID: 701066863H1
gttctcctgagctgtgtttattctctttctctgccctctcatcttcgagctccgatggcgagcctgtggcgcgcggcaaccggcatgacggacaacgccaccgattacgacggcgtcgagttctggtcgaaccccgagcggaccggctggctcaccaagcagggcgatta

SEQ ID NO: 13290 - DNA, 201 bp, Glycine max
  Clone ID: 701066864H1
gctaaaaccaaaatctcgttgcagtgttttcgcctttcctctcacaccaatggccgactctgtaatttcgattcagtacctcaaagatttcgttaattctcaaatctatgacgatgagaaatgggccttcaatgcgaaattgctgcgtgctgctggattgttcgcaggatcaatactacttatgcgaaactatggtgacct

SEQ ID NO: 13291 - DNA, 256 bp, Glycine max
  Clone ID: 701066865H1
ggtctgtgaactggacttaatattcaactttcacaaggtttgtatgtggccatggcctatgtttgttagtcgaaaaagtggctacttgtttttctttcgtctattaccattatagatgattcttcccatataggtccacccagaattagcttcaataattgattgtataaagtgcaagttcgtttttggcgagtaaaggtccttctgattctgagtttgttttcgttgtaattgtaatgtcgaaagcccactatat

SEQ ID NO: 13292 - DNA, 214 bp, Glycine max
  Clone ID: 701066866H1
accattctcttcactttaaagttacatagtttttcattgttttacttaatctacattggctgcttcaacaatgactctctcttcatcatcattggctggtcaagctatcaagcttgccccctccacccctgagcttggtgttggaagggttagcatgaggaaaacagccctcaagactgtttcctcaggaagcccatggtacggccagaccgtg

SEQ ID NO: 13293 - DNA, 254 bp, Glycine max
  Clone ID: 701066867H1
cagaaatctcgtgtggaacaaaagggtaaaagctcgtttgattcggatttccagtacgaacacaagccaagtgaaagtgagataaaatagaaatcaaagagcataatgtcagggatcattcacaagattggggagacccttcatgtgggagggcacaagaaggaggaggagcataagggtgagcaccatgctggagaatacaaaggggagcaccatggtgaacacagtagtgagtacaaaggcgagcatcatgg

SEQ ID NO: 13294 - DNA, 252 bp, Glycine max
  Clone ID: 701066868H1
ctgcgacccaaacaaaactacttttgatgttgtcttggtttggttcttaaaaaattccgaaagttgaaaaggttgtcaacaagggaagacaccgagttgaacctcgaacacacacatacacatatactgccaccatccctcaaaaatagaccagacaaaactttgttatcttctgcaaacagaaacttgcttgctattactacaaggattggatcctggcaaggatatctctatgggagaagcacctacatt

SEQ ID NO: 13295 - DNA, 243 bp, Glycine max
  Clone ID: 701066869H1
caaacactgcatgcgtctttgaccacaactgcttcttcaattcccaatctttttggacaccctctattgctattcctcccttggtgttgtttgtgttaaagggtatctctctacttaatataaagttccattgtctcttgaggcaattttcaaccttagttgtgtgttttggagagtttttctgtgttgttttgttgaggttgggtttgtgagtgatagaatggtgggtgctctatctgttgt

SEQ ID NO: 13296 - DNA, 233 bp, Glycine max
  unsure at all n locations
  Clone ID: 701066870H1
gccactgcatttctgcttgtcttctctgaacatggtagtcacaaacacaaaccagttaggggaaaccattgattccacttatgataggacctctcnncatatagncttngatgatccaagagccggtgttacacgtcttgtagagtccggagtgaccaagattcctcgcgggattcatgctggcaagctggatgtcattgaaacctaacctagtcagaccaggttgagtatcc

SEQ ID NO: 13297 - DNA, 249 bp, Glycine max
  Clone ID: 701066872H1
ctctctacaaacaatatcaagacaacttcatctaattaaccatgaatcaccaacaacaatctcctgtgactgcatatccagcagtgagtcagagcaacccagcagctccaccaccacctgtgggttatcccacaaaggatgatgttccttcccaacaaaatgttccaatcaaaacctctactaggggtgatggcttttggaagggatgttgtgctggattgtgatgttgctgtgccctggattgttgtc

SEQ ID NO: 13298 - DNA, 247 bp, Glycine max
  Clone ID: 701066873H1
gtgccaacaaaagaagatggcctcacaggtttgcaaagctgcttccagagccgcgaggtcccttctctccgcttccagagcctcccatggacgtgcggttggggctgctacggctgtttcattgagctgcaaagtgcctcttttctacggaaagaacggttctggaagtggttccgcttcatcatcatcatcatcatggatttcaggagcacttgctcttcctgccgcagcttacatgttccaagat

SEQ ID NO: 13299 - DNA, 249 bp, Glycine max
  Clone ID: 701066874H1
ctataagctagtttatcgtgaggagaatatgaagttgtttgttctctttgttgctgcagtagttttggtagcatggccatgccatggcgcaggctaccaaaggttccctctccgaatgaacactggctatggtgagcgttcttcggaggtaaaatgcgcaagttttaggcttgctgtggaagcacacaacatccgagcctttaaaaccattcctgaagagtgccttgaaccaacaaaggactacattaa

SEQ ID NO: 13300 - DNA, 250 bp, Glycine max
  Clone ID: 701066875H1
ctcttctcaattctcataggccaatgtcaaatcctcaaacaaacaacaaccgccaccagcccagccgcctgcagcgccgcgccccctcctccctgcaaataaaccgcgccgtcgagtggaacgtcgccatccccctcctctccccgctcgcatcctctccgccgccgatggagctaaaaccgccgcaagagccgccgcagcgggaggcggagaaggtcaccgtgtcgttcaagaagtggcagcaccccgc

SEQ ID NO: 13301 - DNA, 177 bp, Glycine max
  unsure at all n locations
  Clone ID: 701066877H1
gcttcatctgtttttctgcatcggcgtgaacaatggcgacgtacgctgcgatgaagcccaataagcctggcttggaggagtcccaagaacagatccacaagataaggatcacccgctgctncaagcacgtcaaaaatctcgagaaggtttgtggggatttggttcctggtgaaaagg

SEQ ID NO: 13302 - DNA, 243 bp, Glycine max
  Clone ID: 701066878H1
ggggtttgaggaaactgagttaaggcttggactgcctggaaacggaggcactgaagaagtgctcatcaggaagaggggtttctctgagactgaaactggtcatgaagatgagtctgccaccactgtggatttgatgcttaatctttcttctaaggaggccgcaaccactgctgctgctgctgcagatccaactgataagcacaagactttgcctaaggagaagacccttctgccagcagatcc

SEQ ID NO: 13303 - DNA, 161 bp, Glycine max
  Clone ID: 701066880H1
atagtcactgacacagttacgctctaaccggttattcaactccgcatccaattcaatgcaatgttgagaaataaaactcaccactagcttcttcaaccaccatcaacaatgaggtattattcccaattcaaacacttatcccatttcctcaaaaccctacc

SEQ ID NO: 13304 - DNA, 181 bp, Glycine max
  Clone ID: 701066883H1
tgtgtttgtataagtagtctttctttgcttaataaagctttttaagcttctttttccctatgtgccatataattcttaatcttcccttttttggctgctgccattgtaatttatatgtattaatgggtcttttagtattggatgctggtgtagcttaaacgttgccttgtgttctcaataa

SEQ ID NO: 13305 - DNA, 245 bp, Glycine max
  Clone ID: 701066884H1
acaatatatgcttcaaggtttgcagctaatgcacttagacttttacgtagaaatggcacaagaaagacgagggtgcctgagagaatatcacccatgttgctgcagaagcctgctgagcctgattttacttctgaagaacaatagtcatggaaaacattggtggttatggatgcctggttccgtaagacaagaaaggatgggagtgaagtaaaaattaacatgaaatgaactttttgatagagggc

SEQ ID NO: 13306 - DNA, 253 bp, Glycine max
  Clone ID: 701066886H1
gaagtgttaccaaatatgatgatttagaactcaaatcaagcattaccaaaaacgatgattttgaaccgagaccaaatattagcaagtatgatgactttgcatccaggtcaaataccaagtacgattctgaacctaaagcaagtgctaccaagtatagtgattaaatgaaaatcaagtaattgtataatacagtcgaagaaaatcgtgctccatatcaatgtatcctatgaataaatagggtgtgaagtattat

SEQ ID NO: 13307 - DNA, 250 bp, Glycine max
  Clone ID: 701066887H1
tccgaagcatgatgcattgtgcgagcattgtctcggctccgtcctacgcgttcccttttctctctggctccgcttccactactccaactgccctctcgctcactaagcgcagttggaagccacctccgagcatggcaaaaggaccagtcagagccaccgtttctacagagacagagaccccggaggccaatcgtcccgaaacgtttctcagaggagtggacgaggccaagtcttccacttcggttcgggc

SEQ ID NO: 13308 - DNA, 235 bp, Glycine max
  Clone ID: 701066888H1
ccgagtagcaacaatgtcgaagcgaggtcgcggaggatcggcgggaaacaagttccgcatgtcgctgggtctgccggtggcggcgacggtgaactgcgccgacaacaccggcgcgaagaacctctacatcatatcagtgaaggggatcaagggtaggctgaaccggttgccgtcagcttgcgtcggagacatggttatggccaccgtcaagaagggaaagcccgatctccgtaag

SEQ ID NO: 13309 - DNA, 243 bp, Glycine max
  Clone ID: 701066889H1
ggcttgttcagtctttcttggaactttgttactctcacacatgtctcgctccgtgcctttggtttcaaccatttatctgctgcttctgcttctggtggccactgagatgatggggccagcaatggtggcagaagcaagaacttgtgagtctcagagccaccgtttcaaggggccatgtttgagtgacaccaactgtggctctgtttgccgaaccgaacgtgtcactggaggacactgccgtgg

SEQ ID NO: 13310 - DNA, 249 bp, Glycine max
  Clone ID: 701066890H1
cttttctcgcctccatcgcaggtttctacctatattgctgttcttcgcttcgattaggatcagtcaccatgtatcttcagttttacataaacgataacggtgacaaagtttacaccactaagaaagattcgccgctagggctacctacacaatctgctcatccagcccggttttcacctgatgataaatattcaaggcagagagttcttctgaagaagcgttttggattgttaccgacccagcagccac

SEQ ID NO: 13311 - DNA, 247 bp, Glycine max
  Clone ID: 701066891H1
ggctcgagaaacctcttcctcctcttcttccttttgcttcaaggtgtggtgttttgtgtttcacatttaaagcaacactgaaaagaaaggaaagtgaagttgagagtttgtttaggaagaacaagaaatgggggttggttcccaggatgccatcaagacgttccaggcattcattgaccaagttgaggagcctttgcgaacaacgtttcagaatgttcatcaagggtttgtcaccgaaactttaatg

SEQ ID NO: 13312 - DNA, 227 bp, Glycine max
  Clone ID: 701066892H1
gaccttaattaaattgtgacttatgtatttatcctttatcctccgcggcttcgtcctccccatcagaagagaaaaagaaaaagaaacttgtttacgatggtcattcaagaaaatccaccagaaagtgggtgtatgtgcactagttggaagcttttcagcatttttctcctctctgtatataaagatgattggattctaaccagttttctgggacatcccttttactg

SEQ ID NO: 13313 - DNA, 247 bp, Glycine max
  Clone ID: 701066893H1
ctcgagccggtttggtgagcgatagggatggcgaagttcaatgtggtgcagaagaaaagaagagctctaatagcagagaagaagagacagcttcacggagaccctttaaccggcaagctcaagatcaaggaccaacccctttccctatccggaaaacgcaaacgcaagctcttcaaaaaatggcgcggggaccaaaaggacgccttgcagaatggtttggtaaccatggaagatgttcaaatggcag

SEQ ID NO: 13314 - DNA, 195 bp, Glycine max
  Clone ID: 701066894H1
gaaaactctgcaaacatgttggtttatcaggacctccttacaggtgatgagcttctctcggactccttccgttacaatgaaattgagaatggaatgctgtgggaagttgaggggaagtgggttgttaagggagcagttgatgttgacattggtgcaaacccttctgctgagggtggagaagatgagggagtcgat

SEQ ID NO: 13315 - DNA, 244 bp, Glycine max
  Clone ID: 701066895H1
gatatgtgcaagtcagaccaaaagcccacttgttctggtggctttacagaagtccatacagagtggagaatccctccaagccttggccaatcattctctggcttcagggaggaccaggctcttcaggagttgggtttggaaattttggagaggttggtcctttggatgctaatttgaagccacgaaatttcacatggttgagaaaagcagatctcttgtttgtggacaacccagttggaaccgg

SEQ ID NO: 13316 - DNA, 152 bp, Glycine max
  Clone ID: 701066896H1
ggaaaagacactgtctcgcgagtgaacacaggttacagcaatggctttctttggtagaattgggaatttattaagacagacagcaagcaggcaggttagttcagaattgcgatcatccccttcgttttttcaggctatacgcagtatgtcca

SEQ ID NO: 13317 - DNA, 126 bp, Glycine max
  Clone ID: 701066903H1
gataatagatactcaacgaaaatattttttgacatcagcccacagacatatctggaagcacttgatcagcaagacaaggcaaaggctgtggagatattagtgggtgatttaaagatgttttccaca

SEQ ID NO: 13318 - DNA, 263 bp, Glycine max
  Clone ID: 701066904H1
cttaattctattcactctctctcactcacaagtcacacccacctggttccctcccccacccaattttctcttctccttttttcccatccaaacatgtcctccactcacccaaaaaacccagcaacaataacaacatccactactctcatcttgctctcaattatactcctttgttttccaacaacctcaaaatccgacaaccctccatgcccttatccatgttacccaccacccattggcacggttactcccacaactccttc

SEQ ID NO: 13319 - DNA, 260 bp, Glycine max
  Clone ID: 701066905H1
cttctcttatctcaatcacaatttctctctcttttctctcttctgaattattgtcatggctaagagctcattcaagatggaacacccacttgagaggaggcaggctgaagcatctcggataagggagaagtatcccgaaagaattccagtaattgttgaaagggcagagaagagtgatgttcctgaaattgataagaaaaagtatctggtccctgctgatttgactgttggccagtttgtgtatgtggtgcggaagagaa

SEQ ID NO: 13320 - DNA, 258 bp, Glycine max
  Clone ID: 701066906H1
caggctttcgctctatgactgaacaatgccatgctgcaaagttattctcaaagcatatgaagcttgaggagcagatttctttgttaaaaaaccgtgttaacattgctagcggcacaccaagcaggataaagaagctaattgatgctgaggcgttagacctttcaaggttgcaagtacttgtgcttgatctgcatcctgatgtaaagggctattccttgttgacccttccacaagtcagagatgaattctgggaccttt

SEQ ID NO: 13321 - DNA, 243 bp, Glycine max
  Clone ID: 701066907H1
ccaagtttcttcctttctctgctctttgccttctctgacacatttggtgccttgtagagcgtgttttgcccggaaggtggtatggcgaaggacgttgaggttgctgagcgtcgctccttctctgggcaggactaccaggaccctccctcagcacgactcattgatgctgaggagctcacaaagtggtccttttacagggctctcattgctgaattcactgccactttgctcttcctctacatt

SEQ ID NO: 13322 - DNA, 240 bp, Glycine max
  Clone ID: 701066908H1
gggcaggaaagcacgtgccccgtgcgatgtttgtagatcttgagcccactgtgattgatgctgttaggactgggacataccgccaactattccatcctgagcagctcattagtggacaggaggatgcagcaaacaactttggtaccggctcctataccattggaaaggagattgttgagctttgcttggaccgcatcagagagcttgctgaccactgcacaggtctccaaggttttctgg

SEQ ID NO: 13323 - DNA, 256 bp, Glycine max
  Clone ID: 701066909H1
caagaatgtgaatgatgaaagagagttcactgaaatgattaaggccatcaaagtgaggcacaacaatgtggtacccacaatggccatgggagttcagcaattgaagaaaggtatggatccaaagattgtttatgaagatcttgttgagattcatcagttccttgaccgcttctacatgtcaagaattggaatccgtatgcttatcgggcagcatgttgagttgcacaatcccaatcctcctccccacgtcgtgggt

SEQ ID NO: 13324 - DNA, 251 bp, Glycine max
  unsure at all n locations
  Clone ID: 701066912H1
aaccctagtaagccgcaatggtgaagtactcaagggagcctgacaatccaactaagtcttgcaagtctagaggcgccgaccttagggttcattttaagaacacaagggaaactgcctttgcaatcaggaagttgcccttggtcaaggctaaaaggtacttggaagatgttcttgcccacaagcaggcaatcccattcagacgtctatccaaangtgttggaaggacatcccaggctaagaatagacactct

SEQ ID NO: 13325 - DNA, 246 bp, Glycine max
  Clone ID: 701066913H1
gcgtgaaatcgtacggtgaagatttgccggaggatgcggtgagagtgacgcgaagtatcatgatcgtgaaaccacctggtggtaaccagagtccgagcggatccgctccggcttcccccgccggttctactcctccggtgtctcctttttcgggagctagagagtccttccgttttcggagaaggtcgacatcagatgcgtacgagaagacaggccagaacagaccaagctcttcttctcctttcg

SEQ ID NO: 13326 - DNA, 267 bp, Glycine max
  Clone ID: 701066917H1
gtagccattctcttcagtttaaagttacatagtctttcattgttttacttaatctacaatggctgctttcggaatggctctctcttcatcatcattggctggccaagctatcaagcttgccccctccacccctgagcttggtgttggaagggttagcatgaggaaaacagcctccaaaactgtttcctcaggaagcccatggtacggcccagaccgtgtcaagtacttgggcccattctcaggtgagcccccatcctatctcactgg

SEQ ID NO: 13327 - DNA, 264 bp, Glycine max
  Clone ID: 701066918H1
cactaactaaagccgagcagcgagagcgagaaaccctaggacgactgccggctgatcacggtttgagatcccgcaccagagataccttctctcgtcccttcaggaagaagggtaccatcgccctcaccacatacctcagaacctaccacgtcggcgattatgtcgacgtcaaggttaacgccgccgtccacaagggaatgcctcacaagttctaccatggccgcaccggtcgcgtctggaatgtcaccaaacgtgctgttgggg

SEQ ID NO: 13328 - DNA, 258 bp, Glycine max
  Clone ID: 701066920H1
cacaaatcacctccacctccagtttacatatatgcttccccacctccacctatctacaagtaagttcgaattgcggaagaccattcacgataaatcatgttctagtttttatcgaggaataaaggcaagctctatttggagtcaagtgaaacatctatcttcctgtccaagttctttgaataaaagtctgaatgtgtcatctctgcactacaatatttgtgattctgaccaagttggttctatttgtttgatggccat

SEQ ID NO: 13329 - DNA, 257 bp, Glycine max
  Clone ID: 701066921H1
gatccttcctcaaacacccatcttttccacccccgtgccacctttaacccttgaactcagttttcttttagctgaacccgctacttctcattctcccacatggcacgtctcactcactttgtcttgctctttgtactcctctttctgtcccatgaactactcggtagtgagggaaggaatttgagacaaataaccattcaatcaccagatgctaccaaagcaatgagcattgcaacaaaaagtgctaatgccatccc

SEQ ID NO: 13330 - DNA, 254 bp, Glycine max
  Clone ID: 701066923H1
agccgaggttgtaaagcgttctcctttgttggaggattttcgctgttcctccacaaggataggctctgaaggtggagttgccttgtctgatgctttagggaattgtgcccatctgaagacgcttgatttgcgagacaacatgttaggtgtggagggtggggtttctctgagtaaagctcttaccaagcaagcagagctaatataggtctacctaagctacctgaacttggaagacgatggtgcaattgctattg

SEQ ID NO: 13331 - DNA, 256 bp, Glycine max
  Clone ID: 701066924H1
ctcaaaaccctgccgtcagtcaccgtcttctctgccgccatgacgcttgtcaggtttctcatgaagctgaacaacgaaaccgtttcaatcgagctcacgaacggaacagctgttcatggcaccattacaggtgttgatatcagtatgaatacacatttgaacacagttaaactaactctgaaagggaaaaacccagttactttggctcatctcagtgtgagaggcaacaacattcgatattatatccttcctgaca

SEQ ID NO: 13332 - DNA, 253 bp, Glycine max
  Clone ID: 701066925H1
cgctgggacgcaaggcattatgctgacgtcccagagtcagaaccctatcgagcaaatccaaccgcgcttcaaggagttggagactcggcttccgcctctggctctccaagcagtccctccccgtcgaggccgccgtcgtcaccaccaccagcgccgcccagggcgccgctatcggcgcttcatgggcaccctcaccgccgatccctcctccaccttccccacccctccgcccaccgcctctctcaacccccaa

SEQ ID NO: 13333 - DNA, 252 bp, Glycine max
  Clone ID: 701066926H1
cttcttcgtgccaagggacaaaaagcacggaagcggaggaaggccaaaccgcacaactgaaaaagggttctggaaagccaccggttcagaccggaaaatagtgaccttatctgatccaaagcgcataattgggttaaggcagacactggttttctatcagggaagagctcctaggggatgcaagaccgattgggtcatgaatgagtaccgtttacctgacaattgcaaactacctaaggaaatcgtgttatg

SEQ ID NO: 13334 - DNA, 252 bp, Glycine max
  Clone ID: 701066928H1
gtaagagtaggaaatcgacaaaccctacgctgaaagaagaaaaaatgtccggcgtaaagagcgcactgaggcagttcaccttcggaaccggcaagaccgccggtcgcaactcggcggggcgcataacttccttccaccgcggcggcggagccaagcgcttgcaacgaaccgtcgatcacaaacggaatactgcttcttctctcggcgtcgtcgaaaggatcgagtacgaccctaaccgctcctccaaaatcg

SEQ ID NO: 13335 - DNA, 253 bp, Glycine max
  Clone ID: 701066931H1
gatccttcctcaaacacccatcttttccacccccgtgccacctctaacccttgaagtcagttttcttttagctgagttcttttctttctcattctcccacatggcacgtctcactcactttgtcttgctctttgtactcctctttctgtcccatgaactactcggtagtgagggaaggaatctgagacaaataaccattcaatcaccagatgctaccaaagcaatgagcattgcaacaaaaagtgctaatgcc

SEQ ID NO: 13336 - DNA, 209 bp, Glycine max
  Clone ID: 701066932H1
agacagtcgtacgtgttcacgcaagaaaccttgttctcttggaagaataacgataaatagacatagcgggagacgtaaaaaaaaagtaaaaaaagcaattgaatttccaatcctgagttcgaaggaaatataagtcaaaaccttattcttcagtgtcgcttgtaccaaaacggcaaaatcgccctgtagactgtacactgagactggtt

SEQ ID NO: 13337 - DNA, 267 bp, Glycine max
  Clone ID: 701066933H1
tctctctataaatctttctagaaagttccctcactccctgaacctgatcgatctctttaccagttgctacactacaccgagatttgccctaaacccgtttgcgttgttgtttgcgaagaaatggcgactaagaggagcgtgggaacgttgaaggagggtgatttgaaagggaagagggtgttcgtgagggtcgatctgaacgtgcctttggatgacaaccttaacatcaccgatgacactagagtccgtgctgctgttcccaccatc

SEQ ID NO: 13338 - DNA, 260 bp, Glycine max
  Clone ID: 701066934H1
gcattatattactagttttaatttgttttgtcgtttgcttctttctttgaccaatgatgactagctttaaggttgcatgtgtggttgcgatgatgtgcatggttgtcgccatgagtgttacacccatggcacaggccgcaatcacgtgcgggcaggtcgccggcgacgtgtctccgtgcctcagttatcttcgaagcggcggaaaaccgtcggacgcctgctgccacggagtgaagtcgctcagcggcgcggcgaagacc

SEQ ID NO: 13339 - DNA, 258 bp, Glycine max
  unsure at all n locations
  Clone ID: 701066935H1
ggttactatctcacatatccacatgcaaatgcaacccgtggttcnctaatgatncattgcttctgttgaagaatcctatgggttctcactgtctctctctctctcccgacattatctctctttatatgagctgctcaangntgagtttctaaagngacagaaaaagagagcaaagggttggcattgatccctttgcacaaaggaaaagagggttgtgctgtgttaaaaaacatattgaacttggtcggttcagagttg

SEQ ID NO: 13340 - DNA, 257 bp, Glycine max
  Clone ID: 701066936H1
ggcttgttcagtctttcttggaactttgttactctcacacatgtctcgctccgtgcctttggtttcaaccatttttgtcttgcttctgcttctggtggccactgagatgatggggccaacaatggtggcagaagcaagaacttgtgagtctcagagccaccgtttcaaggggccatgtttgagtgacaccaactgtggctctgtttgccgaaccgaacgtttcactggaggacactgccgtggcttccgtcgcagat

SEQ ID NO: 13341 - DNA, 256 bp, Glycine max
  Clone ID: 701066937H1
gtgcattccacacgctgcttccgactgaaggcatctaaggagagaaaaatgcacgatttctgcttcacgatcccctacggattgatgttagtgggtggtggactgttcgcctacataagcaaagggagcatcgcttctctcgccggacgctcggctccggtttgcttctcatcgtcgccggctatctcagtctcaatgctttcggcaaacgaaaaaactcttacctcgctctctttctcgagaccgtttgtgcagc

SEQ ID NO: 13342 - DNA, 142 bp, Glycine max
  Clone ID: 701066939H1
ctcgagcgcttggagcttatacccaccgtgataaaaaaaatgctttgacttgatgtaaccaaaaaaaaaaaaaaaaaaaaaaaaaaaaaaaaaaaaaaagaaaaaaaaaaaaaaaaaaaaaaaaaaaagagaaagggggggg

SEQ ID NO: 13343 - DNA, 253 bp, Glycine max
  Clone ID: 701066941H1
ccaggagggaggcatcaaaggcgtaacccgcaacccaacccttccccttccctctaactccatcaccgcatcaccacaccagtcccctgcaccctcaaacaccagatccttccccccaatcccaacgatgaacgatttcgacggcctcttcacctccgatttcggcctcaaaccccagggcaaatccgcgccaatggctcctcaacccaagggatcttccaactccgcatctctcaacttcgatttcggatcg

SEQ ID NO: 13344 - DNA, 243 bp, Glycine max
  Clone ID: 701066942H1
ctttttcttcccatttcacccctcgtctttccttgtttccggtgagggccaaccacaacatatgttaaacaaggaacaacctccaaaacataacatcctacgccaaacaaaactttgacctccttcagatctatacccttctctctctctctcttctattttcaaattctacatcatgggcacggaggttctacggccacaagattgtttcacccaacgcatcggtcttccaccgcctggctt

SEQ ID NO: 13345 - DNA, 249 bp, Glycine max
  Clone ID: 701066943H1
gtcttaatgactcaggcttcaccaaatcaagataaaaaatttgtgttcaattcaagctccctcattatagtccaaaatccttaaattatatcgagcatggtcaggttagccttgtctgttgaattggttttgccatgacctttgtatgcaaaccagcacatgatggtaggaaaaatgaaagtgactattacatcggagtagaggaagaagataggtttgtgagtaaagagtaagagtgacatgtgacaa

SEQ ID NO: 13346 - DNA, 249 bp, Glycine max
  Clone ID: 701066944H1
cgggaattcaagcactttgtaattgttaagttcaaggaaggtgtggccgttgacgagctcacaaaagggatggaaaagttggtcacggagattggtgctgtcaagtcctttgaatggggacaagacattgaaagcctagatgtgttgagacaaggtttcactcatgcattcttgatgacattcaacaagaaagaagactttgttgcatttcagagccacccaaatcatgtcgagttctcgacaaagttt

SEQ ID NO: 13347 - DNA, 250 bp, Glycine max
  Clone ID: 701066945H1
gtgcgccatcgtagaagtgaagattcagtttgggatttttcgattcgctctcaatttgcagtgcgtgagtgcaccacatggatacttccgaattgcccaacctaaagaacatggattgtgatgtatcccgtttacataaactccaagaaaacgatggccgaaggaaggcgcattggcctcgccaaagcctgcgaaaatcctacttgcgccgaaatcggtgattgctgcagctatctgaagctcccttttg

SEQ ID NO: 13348 - DNA, 251 bp, Glycine max
  Clone ID: 701066947H1
ctaagattgagctataatggctgccaggagaccgggtttgattgctttgtttgatgttgatggaactcttacagctcccaggaaggtggtcacaccggagatgttgacattcatgcaagaactgcggaaggttgtaactgttggagttgttgggggttctgaccttataaagatatcagagcaacttggcagcacagttaccaatgactgtgattatgtattttctgagaatggtcttgtggctcacaagg

SEQ ID NO: 13349 - DNA, 254 bp, Glycine max
  Clone ID: 701066948H1
gtttgttgcttccttgaaagccattgatggccatggagaagcaatggatctatcagtggcaaagaggcatttgtaatgcagagacaaagtggggatgacgaaggtgcagtggtacgccatgtacttaatatctctgatgtggttccgcacgtatatcgctgacatgttcaacaaacagacacatcatcacaggagactaatggcaaggatctcccacaaaactattgaattttcaaggatcagttgcaaaattt

SEQ ID NO: 13350 - DNA, 262 bp, Glycine max
  Clone ID: 701066949H1
cttctaattgctactatcttgcattggtatgctgctgtgttctgctgctgacgaaccccaccgtggcggagcaggacgagcagaacttggtgctccagtaccacaaaggcgcgctcctcaaggggaggatcaccgttaacctgttatgctacggcagcttcaccccaatccaacgctccacaatcgttgacttcataaagtcgttaagctcctccccgggggccccacttccctcggtggcatggtggtggaagacgacgga

SEQ ID NO: 13351 - DNA, 254 bp, Glycine max
  Clone ID: 701066952H1
cgatgctccgtagtttcgatcgacgcattcttcacttcaagatatcacaatgtctataacgcacagcctcactactccactctcttcttcttcctctgctttcttagctccttcttccttcaattgcatgggacaggtttcgttgcctgtgaagagcgtgacatttgcaaatgcgttgccacacccgaagctgagactgcctacaagacaggggtcaatcgcaatccaaatatggggaaacttcaagctggcta

SEQ ID NO: 13352 - DNA, 253 bp, Glycine max
  Clone ID: 701066955H1
ctctaacaccacatttcaaaatgaagcattgcatctcaaaacattttctaagttgtttcgctttgtttctgttgctagtcgcaacaacctatgccactgttgtccctaccaccacccaaaagccaccaagaagctttgcaaaccaattcctcatcccccagaacgcggcacgtgcggtgctgaggctgcggccattggtgtgggactccaaattagcacactacgcgcaatggtatgccaaccagaggcgcaa

SEQ ID NO: 13353 - DNA, 252 bp, Glycine max
  Clone ID: 701066956H1
cgacagcaaaaagatggctagtttcagattttcattcggtttcggagtggtggccgccgttgttctctctctcatcttcactctttacatgcctgtcgctgttcatgcccaatccctagctccagcacctgctcctaccagcgacggaacgtccatagatcaagggattgcgtatgttttgatgatgttggctttggcactcacttatctcatccactcctccaccttctgaaaaggacgctctttcacttg

SEQ ID NO: 13354 - DNA, 249 bp, Glycine max
  Clone ID: 701066958H1
gtagcagcagctgagcttgtttccgtcgccgcttcacccaccgtagcaaccatgatcattcccgagaagaaccgtaaagagatctgcaaatacctcttccaagagggagtttgctttgcgaagaaggacttcaatctggcaaagcacccagagattgatgtgccgaatctgcaggtgataaatctgatgcagagcttcaaatccagagagtatgtgagggagacatttgcgtggatgcactattactgg

SEQ ID NO: 13355 - DNA, 250 bp, Glycine max
  Clone ID: 701066960H1
gcgatctctgcgccttcccctattttttctgaatctaacaacaaacatccctcaggcaacaatcatcactattaataagagttccttccttcactctcacccaagccaaagaaaggaacaagaacaagaacaacaaagtaacgtgaaagagagagagatggaggcgattgttccagtggtggatttccagaggctttcagaggcagaggagcgcaagaagctgagaaaaacatgtgagaacccagggtgt

SEQ ID NO: 13356 - DNA, 247 bp, Glycine max
  Clone ID: 701066961H1
ctcgagataactagaaacagtgtgatgaaaatgaaggtccttgttttcttcgttgctacaattttcgtagcatggcaatgccatgcgtacgatatgttccctctccgaatgaacactggctatggtgcccgtactccggaggtgaaatgcgcaagtcggaggcttgctgtggaagcacacaacatctttggctttgagaccattcctgaagagtgcgttgaagcaacaaaggaatacatccatggcg

SEQ ID NO: 13357 - DNA, 255 bp, Glycine max
  Clone ID: 701066963H1
ggcagagtgagagacaagagaagagaagatgacaacacgcttcaagacgaacaggaagaagaggggccacgtcagcgctggccacggtcgaatcggaaagcacaggaagcaccctggaggacgcggtaacgccggaggcatgcaccaccacaggatcctcttcgacaaataccaccctgggttcttcggcaaggtaggcatgcgctattttcacaagcttcgcaacaacttctactctccgatcctcaacatcga

SEQ ID NO: 13358 - DNA, 230 bp, Glycine max
  unsure at all n locations
  Clone ID: 701066964H1
gaagtctagcttgggtagcgaatcacaatggcgagaggattaaagaagcatctgaagaggcttaatgccccaaagcattggatgcttgacaaactgggtggtgcatttgctcctaagccctcatctggaccacacaaatcgaggacccggctgncactcatactcattttgcgaaaccggctgaagtatgctctaacataccgtgaagtcattgctattctgatgcagcg

SEQ ID NO: 13359 - DNA, 134 bp, Glycine max
  Clone ID: 701066966H1
cgttgttctaaagcactcatccacacattctccgtcgccacgacaacaatggctccaaagaaaggtgcgaaaggtggagttgtagcagcaaagaagaaggttcaggagaaggtaacgaaccctttgttcgagaa

SEQ ID NO: 13360 - DNA, 257 bp, Glycine max
  Clone ID: 701066967H1
ctcgctgccgtcgtggtgaccgcccaagaaaacagaatagagagcgcaaacgagtcttcatcttcgactcaccatgaagctcgtcaggtttttaatgaagttgaacaatgaaaccgtgtcaattgagctcaagcatggcactattgttcatggcaccattacaggtgttgatatcagtatgaacacacatttgaaaacagttaaactaactctgaaagggaaaaatccagtgactctggatcatctcagtgtgaggg

SEQ ID NO: 13361 - DNA, 255 bp, Glycine max
  Clone ID: 701066968H1
ctaattttcgcccaaggatcaacaaacttgattcaaccaaggacagagaacaaaagtctgccgggtcttattattaccttgatgactgagttcatactttggggctgttctttcaccaacacaaccttgcatctgtttgagcttttcatgggatctcagatttggttcagttcatgccttgaaatataagattgccatttttgccgatgaaagcatctttctcaatgaatagaggagcctgcatgcaattgcaag

SEQ ID NO: 13362 - DNA, 253 bp, Glycine max
  Clone ID: 701066969H1
catatctcatttgaatacattccttgtagtttatactgaaagatgggtttgaagatggcgttactgatcctaggcctttccctcatgctccttttggtctcctctgaggtggcatccacgaatacaaaagaggaggcaaatggagtggatgatgccaaatatcccggtggaagctatggagggggttacccaggtcatggcggtggcggttatcctggccatggcggtggcggttatcctggccatggcggtg

SEQ ID NO: 13363 - DNA, 251 bp, Glycine max
  Clone ID: 701066971H1
ggagaggagaaggcgatgcaacccacatccggcggcggcgggctggcaaggttccgttcagctccggcgagctggttagaatcagttctgttgaaggaagaggaagaagaagaagaccccttaagcttcactcaactgctttccactatcgatgatgctccctctcattctcaacaccaactctatggtgccgctctctcaaacaaggataaaacacctgaaatcttcatgttagaagattccgttccttg

SEQ ID NO: 13364 - DNA, 246 bp, Glycine max
  Clone ID: 701066973H1
caataatataattagtaatgttgttaattattctttgttgatgaagggtggttgccaaccttgtcaagtgttcggttccacttctaaacaattgctcagctaattatagttgagaggggaagttttgtgagacggaatttgcttgtctttatgatgagaagcagtgggttgggttctgtagtgttaattaattggtgtatgcatgggttcggtgggtcgtgatgaagaacatgttttctccatgtt

SEQ ID NO: 13365 - DNA, 247 bp, Glycine max
  Clone ID: 701066977H1
ctcttcatctcccaagggattcaatacaataccaggctagaagaaactccactcatcaccatctcaagcaactaattaacaagctagtactctttgagtgtttggcaattggcttagatttcttgtacttggaacaagatggaaagcactgtcacatttgagactgatctcaacctcaaggcaaccgagcttagattggggcttccaggaacagaagaaattgttgaaaaaccacttcctgcaagtg

SEQ ID NO: 13366 - DNA, 247 bp, Glycine max
  Clone ID: 701066978H1
cttggtctggacaaagagttgaagaggcttgtatttgaaatcactgccaaccaggacccactggttagtaagggatcaaatttggttccattgattggtattgatgtttgggagcatgcgtactacttacagtacaagaatgtccgaccagactatcttaagaacatttggaaagttattaattggaaatatgccagtgaagtgtatgagaaagagagctcttagtctgaaggagctacttgatata

SEQ ID NO: 13367 - DNA, 251 bp, Glycine max
  Clone ID: 701066980H1
gcatcgctattagggtttgcagagttgcactttccctttcttccaattcatgcgttttgttttcgattccctttctctatcacgccaaatcccaccgaatcgtgcgacgcggtatattggaatctcacttgggctctaattgatgcattcacaccgttagcggttgggctccaattctccaagatgagcaattctcactctgaaaatcatgatgaagtaactgtggcgggatttgaagttccaaaatctcc

SEQ ID NO: 13368 - DNA, 98 bp, Glycine max
  Clone ID: 701066981H1
ttcttaacacttttatttacgccaacagttattactaaggattgtattcacattaatgtcattgtttattactggtggaaaggatggttaacgtggtt

SEQ ID NO: 13369 - DNA, 254 bp, Glycine max
  Clone ID: 701066982H1
ctacaagatgccactcagattgttgcaaatttacagaggcagcaggttcagtccaagctcatcgcctctgattacttttatactaatttggatcttatggatgtcttggtatctggatatgaccacacagatatggctttacactacggtgcaatgttgagggagtgcataagccaccagattgttgcaaaatatgttctggactcacctcatatgaagaagttttttgactacattcagcttccaaattttga

SEQ ID NO: 13370 - DNA, 255 bp, Glycine max
  Clone ID: 701066983H1
cgagtctagaacaacgtcgaattgaatgtgcctatttaataagaacaaattgaagcccttattcccaattcccctttcaattaaattgcagcaatcttcgtctctgatccatggcttacgttgagcgaggtgttgtcaaatcaaagcgatcaatatggcgacttaaaacaatcactgattttttctgggccattgttaacttcataggcgtgtttttcgcaactatgttctcgatggaaaagtcagatgcgtaca

SEQ ID NO: 13371 - DNA, 253 bp, Glycine max
  Clone ID: 701066984H1
cggatcttccttcctggataacgttttcgggttcgagaaggcacttgtgttgtttttcgtacgaaatggagactaaacatagttcggtgacggttacgctcagttacggcgcgttgacgtgcgccgcggaatttctcgcgactttgctagcttctgctgtcgtcaaagcctcgcttttggccccggatctctaccggctgctattgatcaacacgcctactgccaaaggagagatcaaaattcagagtgaaga

SEQ ID NO: 13372 - DNA, 123 bp, Glycine max
  Clone ID: 701066988H1
catcagtatcatgtggttggttggttggggttcatagagtgagtgaatggagtctgttatgagaagcataaaaaaaacatgatgagctaccttcgataaaattaggacatctataattcgcct

SEQ ID NO: 13373 - DNA, 246 bp, Glycine max
  Clone ID: 701066989H1
caacaacacaaaattcattgcacagtgttattttcagtatcagcatcatggctcgaattgcagtgggagatgtcattccagacggcattttggcctacttggatgaagaaaacaaaccccaaactgtctctattcactctctcgccgccggcaagaaagtcatcatctttggggttcccggtgccttcactcccacatgcagcttgaagcacgtgcctggcttcattgagagagcagaagagctga

SEQ ID NO: 13374 - DNA, 240 bp, Glycine max
  Clone ID: 701066990H1
cgtctcttcctcctctctccgcatcgctgcgttttccgaatcgaaaggtacgtaagtcacaatggtggaggccaagggtaggaaagaggaggtcgtcactcgagagttcaccatcaacctccacaaacgcttgcatggctgcacattcaagaagaaggctcctacagcaattaaggagataaggaagtttgctcagaaagcgatggggacgaatgatgtgagagtggatgtgaagctgaa

SEQ ID NO: 13375 - DNA, 243 bp, Glycine max
  Clone ID: 701066992H1
ctcctgtcctgaagatgacagcaaagtggtatctcattgtgtgtgttgtagcgatctgggccgttgatctgggttcatcatcacaccatgcccgtgccccagcaccagcaccgtcagtggagtgttcaaacctggtattgaccttatcggattgcctcaccttcgttagcaacggcagcaccgtcaccaagccacagggaacatgctgctcttccttgaaaactgtgctcaacacagccccta

SEQ ID NO: 13376 - DNA, 246 bp, Glycine max
  Clone ID: 701066993H1
ctaagctagtttatcgtgaggcgaatatgaagttgtttgtcttctctgttgctgcagtagttttggtagcatggccatgccatggcgcaggctaccaacggttccctctccgaatgaacactggctatggtgagcgttcttcggaggtaaaatgcgaacatcttaggcttgctgtggaagcacacaacatccgagcccttaaaaccattcctcaagagtgcgttgaaccaacaaaggactacatta

SEQ ID NO: 13377 - DNA, 248 bp, Glycine max
  Clone ID: 701066994H1
cagaagcagaaagacagaataagaggttgcagcaacaatggcagccatggctgcgcttcagagctcaatggtcggtctctccctctcctccaactctttcttaggccaacgcctttctcgcatcaccctcccctctcttcttccgggtacgtcaacagagaagcaatgtcctattgtcatgaggcttaaacgatgggaacggaaggagtgtaaaccatacagccttcctatcttgcacaaaatgcatg

SEQ ID NO: 13378 - DNA, 249 bp, Glycine max
  unsure at all n locations
  Clone ID: 701066996H1
caaagtaagacgtatagtgttctacgagtgagccacttgtgagacatggcttccaaggctgcacttctcttgtgtctccatgttctctttttcactgtggttagttccacatatgtgccatgtcatccannccccaaaactcccaaacacccacctgtcgcagagccaccatccccaaagctagcaagctgccccaaagacactattaagttcggtgtgtgtgctgatgtgttaggtttgattaatgtg

SEQ ID NO: 13379 - DNA, 276 bp, Glycine max
  Clone ID: 701067001H1
ctatgcccctgacacaaaaaggcttgcagatgggcttgccttctttctcgcaccaattgacactaagccacaaacacatgcaggttatcttggtcttttcaacgaaaacgagtctggtgatcaagtcgtcgctgttgagtttgacactttccggaactcttgggatccaccaaatccacacatcggaattaacgtcaattctatcagatccatcaaaacgacgtcttgggatttggccaacaataaagtagccaaggttctcattagctatgatgc

SEQ ID NO: 13380 - DNA, 254 bp, Glycine max
  Clone ID: 701067002H1
ggctcatccgaagctggaagtaaagacaagacaagaacttgggaagttggttggtatcataccatgggacaagtctttgacaagttagagggtaaggagtggaggcaaaggcaaataaggaagataacagatcgagtttttgacaaagtaaagaatcaaatagagactgataacttgagttttgaagatctgtatattgctgttttgcttgtgtacaatgatatcaacaagtatatacctggtccccattttga

SEQ ID NO: 13381 - DNA, 268 bp, Glycine max
  Clone ID: 701067003H1
aattaacagaagaccaagaccatattaggtttgaagccaatattttgtgaatatatgtattaggctgctactaacaagctttggctcacgggtatgctagttgctagctatgggggaattcaagcactttgtaattgtcgagttcaaggaaggtgtggcagttgacgacctcactaaagggatggaacagttggtctcagagattcatgctgtcaagtcctttgaatggggacaggacattgaaagcctagatgtgttgagacaaggt

SEQ ID NO: 13382 - DNA, 268 bp, Glycine max
  Clone ID: 701067005H1
ctcatttcaatttgcatttgcatttcatttggcgttttgtttctatctggaagcttcacttcggcatccatggcgtcgttcgaagaagctcctcccggaaactccaagaacgtccagaagatcttcaagaccaagtgcgctcagtgccacaccgtggacaaaggtgccggtcacaaacaaggacccaatctgaatggtttgtttggaaggcaatctggcacaactcctggatattgctattctactgctaacaaaaacgatggctgtg

SEQ ID NO: 13383 - DNA, 247 bp, Glycine max
  Clone ID: 701067006H1
ctcgagtgctcgagccgaatcggctcgagtgatgtcacaccatttttggatgagcatgcagactgtgatgcagttttgctgacgtcaacaggtagtcaatttctgtttgttggctggttcatattgtccgtctgtaggtcggtcaagcagaagtagtaagtggaaaggagtggagtaagaaactcagccatgtatttttatagggaaggatgccaccattgattttgaagatgtgggccacagtgat

SEQ ID NO: 13384 - DNA, 265 bp, Glycine max
  Clone ID: 701067007H1
ctctaatcactctagctgttgcaaatttgctatcccctcaatggcttctgcagatgttgagttccgttgctttgttgctgggcttgcttgggtcaccggcaacgatgccctcgagaaagccttttcaatctacggcgacatcgttgaatcgaaggttatcaacgaccgtgagactggaaggtccagaggattcggatttgtgaccttcgcctcagagcattcattgaaagatgcgatcgccggaatgaacggccaggaccttgac

SEQ ID NO: 13385 - DNA, 112 bp, Glycine max
  Clone ID: 701067009H1
cggctcgaggcctttttctatctctccattttgcaggattttgttttcttttcttatgttaatcacactgttttatcccatgagcttatcattaactattttaattcgtttt

SEQ ID NO: 13386 - DNA, 260 bp, Glycine max
  unsure at all n locations
  Clone ID: 701067010H1
ggcttccgaagaatcccagaacaagccccccagcgagcagtccactaccgaactcatcacgagcgcgaactcggtggcggaggcggcgcagtcggctctgaagagcgacagcgncaaagtggacaaggccaaggtggctgacgctgccggcgatcttctcgacgcggcggggaagtatggacaacttgatgacaaacagggcctaggggcatatgttgaccagggtgctgattatctgcataattaccgggctgataata

SEQ ID NO: 13387 - DNA, 88 bp, Glycine max
  Clone ID: 701067011H1
gcgcgaatgaattaacaaacattgagatattaaaggtaactggatgggtggttgaataccaagataatctgattgggcttggagtcga

SEQ ID NO: 13388 - DNA, 60 bp, Glycine max
  Clone ID: 701067012H1
ccaaaaaccaaaacccctgtgtgtctgtgtgtgcctgtaacactctcacacagttccaca

SEQ ID NO: 13389 - DNA, 137 bp, Glycine max
  Clone ID: 701067013H1
cggtcgagtcgagcgaatcggctcgagggctcgagtcgcttggttgcaggttcagcagcagcggcaagcaagtccatccgcaatgactatcgatttgaaggcaggaggtaagtccaagaagaccaaacgtacagccc

SEQ ID NO: 13390 - DNA, 132 bp, Glycine max
  Clone ID: 701067015H1
gggaaagaaagcatagggataggaagaaggaagaatggagaagtatttcggaaacgcttatcgtcgcgacccgggcgtgccccattcggacccggatcgcttcgtcaacatatgggtcggatccgctgcctt

SEQ ID NO: 13391 - DNA, 258 bp, Glycine max
  Clone ID: 701067016H1
agaaaatgaaagtccttgttttctttgttgctatagttctagcagcatggcattgccatggctcagaccatgaccatgaccatggccacacctaccaaattttccctctgagaatgaaaactggccatggtggccactacattccggaggtatcatgccaaagttggaggcttggtgtggaagcacacaacgtcattgactggaaaaccgttcctcaagattgcgagggatatattgggaactacatgcttggcgaac

SEQ ID NO: 13392 - DNA, 113 bp, Glycine max
  Clone ID: 701067018H1
atcgagataagtagaaagagtgctgagaaaatgaaggtccttgtcatcttggccgctacagtattggtagcatggcaatgccatgcgtacgatatgttcccactccgaatgaa

SEQ ID NO: 13393 - DNA, 107 bp, Glycine max
  Clone ID: 701067020H1
ttgggagccaaatgggtcttctgagtatcataaggaaaatcaagcggaaagagaaggaaattcgaattctaatggtcggattggaaaattctgggaaaaccacaatc

SEQ ID NO: 13394 - DNA, 266 bp, Glycine max
  Clone ID: 701067022H1
tgaaaagtaaaggcgaaagactttaggtttggacttgggaattagggttgttcgcgtcacgaagatgatcgaggtggtgttgaacgatcgattggggaagaaggtgcacgtgaagtgcaacgacgatgacaccatcggcgatctgaagaagctggtggcggctcagacgggcacaagagccgacaagatccgcatccagaagtggtacaccatatacaaggatcacatcactctcaaggattacgagatccacgacggcatgggtc

SEQ ID NO: 13395 - DNA, 264 bp, Glycine max
  Clone ID: 701067023H1
gtttgttgtgagctataagctagtttatcgtgaggagaatgtgaagttgtttctcttctctgttgctgcagtagtattggtacactggccatgccatggcgcaggctaccaaaggttccctgtccgagtggacagtggctatggtgagcgttgttcggaggtaaaatgcgcaagtcttaggcttgctgtggaaggcacacgacatccgagcctttaaaagcattcctgaagagtgcgttgaaccaccaagggactacattagtg

SEQ ID NO: 13396 - DNA, 132 bp, Glycine max
  Clone ID: 701067027H1
ctcgagccgctcgagccggtttaataatgtctgggaccattcgagtgcatgatgacctgcttctggctgcctctgaggctttggctgcacaagtgagccaagagaactttgataagggactcatatacccac

SEQ ID NO: 13397 - DNA, 109 bp, Glycine max
  Clone ID: 701067029H1
gaagaagcccatacttgtgggagatagatggcacgcttgtcactgcacattttcgcgttctgcgccgtcgccgtcgccgtcgccgtcgcgggctcctccttcgatgatg

SEQ ID NO: 13398 - DNA, 142 bp, Glycine max
  Clone ID: 701067030H1
ctaggcctttccctcatgctccttttggtctcctctgaggtggcatccacgaatacaaaagaggaggcaaatggagtggatgatgccaaatatcccggtggaagctatggagggggttacccaggtcatggcggtggcggtt

SEQ ID NO: 13399 - DNA, 130 bp, Glycine max
  Clone ID: 701067032H1
ctttcacttttgctttgagatggcaaagtcgaagaatcacacagcacacaatcagtcctacaaggcccacaaaaacggcatcaagaaacccaagaggcatcgccacacttccaccaaagggatggatccc

SEQ ID NO: 13400 - DNA, 270 bp, Glycine max
  Clone ID: 701067033H1
ctcacacagaggatgcaattcgggttactcagtccacagcaaactttttcataagtgaagctaggaaatccacaaacacacctgatgctcaaaaagtgcgagataatctcatctacaattacaaacctacttttggtggaacggctgggaaaggatatgatcaagtgtatctctttgaataattctatctgtaggaggtgtccttgaatttgattttatgcacaataaattatgaactggggatgtagtttgaagaaataaaaatttgtg

SEQ ID NO: 13401 - DNA, 268 bp, Glycine max
  Clone ID: 701067034H1
ggatttcggccgtttgctccccaaggaaagaagcagagtgtttcttttgaaatcagctagaaaagatgtcaggtgaagaggtagctgttgcagctgaggcacctgctgcttcaattccaggtgagccaatggacatcatgactgctctacagcttgtgctgagaaaatctctggcctatggtggtcttgcacgaggtcttcatgaaggtgctaaggtgatcgagaagcatgctgcacagctctgcgttctagcagaagattgtgacca

SEQ ID NO: 13402 - DNA, 232 bp, Glycine max
  Clone ID: 701067036H1
tgtgatttgctcacaaaaccagtgtcggtcacaccatctctcccttttctccacctgcatcgatgtccgttaaggagtgccatcaccaccacaagggaaagaagcacatcctctggagacgcatcttctggggaatagtgatcttcgccttcatcgtgttactgacagttcttatgatctgggcaatcctaaagccttcaaaaccaaccttcatcctccaagacgtcacgcg

SEQ ID NO: 13403 - DNA, 251 bp, Glycine max
  Clone ID: 701067038H1
ggatggtatctctgtcacctgcaagtacccagccgatccaactgttgcattggggtatctttctacagcatttcttgttgcatccactgtgattgggtatatgtctttgttttacccttacaaaggaaagtctattccacaagggattctgtctaagcacaccactttcacagtgttcttcaacatttctttgttcaccgctggattagctgcagctatgctgttatcgccaacaatcacggacacattca

SEQ ID NO: 13404 - DNA, 109 bp, Glycine max
  Clone ID: 701067040H1
cagaagagaaaatcgcaggtgaaaatgagcggaacggtgaagaaagtacccggtgtagcattcaaggtgggaaggaacatcgattgggatggaatggcgaacttctcgt

SEQ ID NO: 13405 - DNA, 153 bp, Glycine max
  Clone ID: 701067041H1
aaaactctgaccgagtccgagaggcatcatggcgacactggattccgacgtgaccgtgtttccggccggcgaacctccagcagcgccggtccttcttcgtccaccaagaagccgaagcgtttcgagatcaagaagtggaatgcggtttccctc

SEQ ID NO: 13406 - DNA, 126 bp, Glycine max
  Clone ID: 701067043H1
tgtttgttgatccatctcttgtttcttgctttctttcttcaccatgtcacttgctgggaaaatcaccactgaaatcggggttcatgcaaccgctacaaagtggttcaacctcttgggaacacaact

SEQ ID NO: 13407 - DNA, 130 bp, Glycine max
  Clone ID: 701067044H1
cggctcgagcggctcgagcggctcgaggtcagcttcaagaaccacgttattcagtggttcgaggtccctgatggcgtacttggccgatattggaaagcagtggggctagccttcaactgtagtttcctcc

SEQ ID NO: 13408 - DNA, 89 bp, Glycine max
  Clone ID: 701067046H1
gcaagaatcgcacttcgaagcgtggtgatgtcgctgtctgtcatgttcagtgttggtcatgcgagagaaagcgatgccagacacgaaga

SEQ ID NO: 13409 - DNA, 265 bp, Glycine max
  Clone ID: 701067053H1
cagaagtcctccattctcacagctaggtggtgatgattagtgtatatatatacatacatggttgaagtgggtatttttcagatccctacgagcagtttggacccatttgcggacgcaaaacaaacagatgcaccaggggcgaaagaatatgttcatatccgcatacagcagaggcaccgggaagaagactctcaccacagtgcaaggtgtgaagaaagagttcagctacgagaagatcctcaaagacctcaagacagagttgtgc

SEQ ID NO: 13410 - DNA, 260 bp, Glycine max
  Clone ID: 701067055H1
atcgagataactagaaacagtgtgatgaaaatgaaggtccttgttttcttcgttgctacaattttcgtagcatggcaattccatgcgtacgatatgttccctctccgaatgaacactggctatggtgcccgtactccggaggtgaaatgcgcaagttggaggcttgctgtggaagcacacaacatctttggctttgagaccattcctgaagagcgcgttgaagcaacaaaggaatacatccatggcgaacaatatagatc

SEQ ID NO: 13411 - DNA, 167 bp, Glycine max
  Clone ID: 701067056H1
cttccttcaaatccgactgagcgaagaagatattagggtttttgagaacggtgcggcgatcctagcactctcttctgcagctttcgccgacagcttcattcaccatggctgagcaaaccgagaaggcttttttgaaacaaccaaaagtgtttctcagctcgaagaaa

SEQ ID NO: 13412 - DNA, 123 bp, Glycine max
  Clone ID: 701067057H1
gaagtttggagcgagtgaactaatcattgaagtttgcactggctgtttcagcttcatcagccttcttttgcatcatttgtgtgtcttgagaaatggcacaagaaacctttctattgacatgtg

SEQ ID NO: 13413 - DNA, 105 bp, Glycine max
  Clone ID: 701067058H1
tcggctcgagcggctcgagcggctcgagccggtcgaagcatggtgacgccattgacgagggtcttaccctttcgtcacccaaatggccataatccccttgccttt

SEQ ID NO: 13414 - DNA, 150 bp, Glycine max
  Clone ID: 701067059H1
ggctcgaggttttgctgggcctcgattggaaaatggacagaactgtagctggtggatggtggatcttcgccaagatcatcagcttatgtgcaactactataccctgaggcaggacggttctaaggccttcccgagatgtacgaatgttca

SEQ ID NO: 13415 - DNA, 104 bp, Glycine max
  Clone ID: 701067062H1
caacaaggtcctgtgttgttttgttctttaaagaagaagaaaaaaagcacacaaaacgaaaaagcaaaatgaaccagccgaacccaagggcacccgtgctgccc

SEQ ID NO: 13416 - DNA, 260 bp, Glycine max
  Clone ID: 701067065H1
atttatattcggtctagataacaccgtactctctaatatcccatactatgaaaaacatggatatggggtggaggaatttaatgaaaccttatatgatgaatgggttaacaagggcgacgcaccggcattgccagacactcttgaaaattgcaacaagctgttgtctcttggcttcaagattgtattcttgtcaggaagatatcttgacaaaatggccgtaacagaagcaaacctaaagaaggctggcttccacacatggg

SEQ ID NO: 13417 - DNA, 173 bp, Glycine max
  Clone ID: 701067067H1
ctgagtttccacactgcataccttatgtcttccgaattcgaagttaatttgcaagatggctaaggaaaaggctcagatcaacattgtggtggttggtcatgtggaccctgaggaggcaaccaccattaacgagctgaagaagcctgttgtggagaaagaagctccagggcatg

SEQ ID NO: 13418 - DNA, 216 bp, Glycine max
  Clone ID: 701067073H1
aatccagatctagtcttatttgttggagaagcactggttggtaatgacgctgttgatcagctttcaaagttcaatcagaaattagctgaccttgcaacatcacctaatccaagattgattgatgggatcttgctcacgaaatttgacaccatagatgataaggtgggagctgcactttcaatggtttacatatctggagctcctgtcatgtttgtg

SEQ ID NO: 13419 - DNA, 127 bp, Glycine max
  Clone ID: 701067074H1
gccagatttcaagatgaagttcaacattgcgaatcccaccactggttgtcagaagaagctggagatcgatgatgacctgaagctcacgagcattttgggacaagacgatctcacaagaggttgttgg

SEQ ID NO: 13420 - DNA, 103 bp, Glycine max
  Clone ID: 701067076H1
gatatgtatacgttgtatcttcctggttgtagtgtattgccctttcttgcatttgattttccccacaatactaatggtttgaacagcaattagacttcaatat

SEQ ID NO: 13421 - DNA, 114 bp, Glycine max
  Clone ID: 701067077H1
cggctcgatcggctcgcgcggctcgaggtcagcttcaagaaccacgttattcagtggttcaaggtccttgatgggttacttggtcgatattggaaagcagtggggctagccttc

SEQ ID NO: 13422 - DNA, 269 bp, Glycine max
  Clone ID: 701067081H1
aacgtctgaattcgggtcgagtacagagagtggtttcagtgagtgatcggtgttcacttgctccttcataagtcgtcatcatcatcatcatcatcaccgttgattgaagaagatgccgatcagaaacatcgccatcggaaggcctgaagaggctactcaccccgacacgttgaaggcggggttggctgagttcatctccaccttgatcttcgtgttcgccggttcaggttccggcatcggctacaacaagctcaccgacaacggcgccg

SEQ ID NO: 13423 - DNA, 151 bp, Glycine max
  Clone ID: 701067083H1
gacaactttgatgaaccaatatgtgaataagaagtttagtaatcagtacaaggcaaccattggagcggattttttaaccaaagaagtgcaattcgaagataggcttttcaccttacagatttgggatacagctggccaagaaagattccaa

SEQ ID NO: 13424 - DNA, 264 bp, Glycine max
  Clone ID: 701067085H1
taggcaacaacaagttctggtactcttaaagcaagtcctttccttggccaaggcaagggtgccaatgccaatgctcttagggatgttgtctccatgggaactgggaagtacaccatgggcaatgatttgtggtatggaccagacagagtgaaatacttgggacccttctcagctcataccccttcatatttgacaggagaattccctggggattatggatgggacactgctggcttatctggtgacccagaagcatttgccaag

SEQ ID NO: 13425 - DNA, 254 bp, Glycine max
  Clone ID: 701067087H1
ctgattcagaaactcttaggcatagcgaaaatgacaaccaccttcgcgaccgtctcaggactcggtggtgcatcactgtcatccacctcatctcgtctcacctcagggtttgtgaaatcgccagtgagtgctaggaatcccttgaggcaagctgtggcaatgggaaatgggagggttacatgcttcgagaggaattggctgcgggcagattacagtgtgattgggtttgggttgattggttggctagcaccctc

SEQ ID NO: 13426 - DNA, 127 bp, Glycine max
  Clone ID: 701067088H1
gagcagaagagcaaaatcgctgtgaaaatgagcggaacggtgaagaaagttagcgatgtagcattcaaggtgggaaggaacatcgattggcatggaatggcgaagcttctggtctccgatgaggctc

SEQ ID NO: 13427 - DNA, 231 bp, Glycine max
  Clone ID: 701067089H1
agcaagtgcagccattttggccctgtatgtacttgttacaattctgtttgccctcccatcatttctcattttgtacttctcatatcctagtttggattggcttgtgagggaaattatcacttaagattgtgaactagtgtaggctccaactttgcaaacattaagacaacagcttatatcttctactttgtaattatccgacttctcctttagaagctgtcattaatcttc

SEQ ID NO: 13428 - DNA, 113 bp, Glycine max
  Clone ID: 701067090H1
gttgttacagcgctgacccttcttaagaaacaccttttcaattatcaagggcatgtctcagctgctttggtgcttggtggggttgatatcactggacctcatttgcatactat

SEQ ID NO: 13429 - DNA, 95 bp, Glycine max
  Clone ID: 701067093H1
cgctcgccttgcttcgccacacaacagcaactgcagcaatggctcccaaacgaggtggaaaggctccggctcttgccgctaagaagaagcctgag

SEQ ID NO: 13430 - DNA, 226 bp, Glycine max
  Clone ID: 701067094H1
gtttgctgttagggacatgcgtcaaactgttgctgtgggagtcatcaagaacgttgagaagaaggatcctaccggagccaaggtcaccaaggctgcccagaagaagaagtgaatcgtgcgggctggttcatcaggggatgttggttacaataaatgttggtttcttttctgtactcttgtgtcttcttttctaggtagcttgtttttcggacaaagtttgaagtct

SEQ ID NO: 13431 - DNA, 253 bp, Glycine max
  Clone ID: 701067095H1
ctgcaatcaacggcaccccccacaaaaatgacaggagagacagtgaacccaaaagcttaccctttggccgatgcgcaactcgcaataacaatcttggatcttgtgcaacaagctgccaactacaagcaactaaaaaagggtgctaatgaagcgactaagacactgaacagaggcatttctgagttcgttgtgatggccgcagacactgagcctcttgagattcttctccatcttcctctccttgctgaggata

SEQ ID NO: 13432 - DNA, 183 bp, Glycine max
  Clone ID: 701067096H1
ccgattagcagaactgatgttattggcagtagaaggaggaggatcttctactgatcggcttcagggtatactaagggcctgagccttgtcctcttgggtcagaggaatgaggataaacccatgagagtagcgccgtggaatcagtatcagttggtagaccaagattctgacccgagctccagt

SEQ ID NO: 13433 - DNA, 275 bp, Glycine max
  Clone ID: 701067101H1
gctgaagtgtctgcttcttccgattccggcacgcccccatcaccatggtgaacgttccgaaaacaaagaagacatactgcaagagtaagctgtgcaggaagcacaccctgcacaaggttacccaatacaagaagggtaaagatagcattgctgcccaaggaaaacgccgttacgatcgcaaacaatctggttatggcggacaaactaagcccgtcttccacaagaaggctaagaccaccaagaagattgttctgaggttgcaatgccagggttgc

SEQ ID NO: 13434 - DNA, 170 bp, Glycine max
  Clone ID: 701067102H1
cgctgcggttagaagagattcaatctgactctgaatggaagctatcagaaagcaagcctccaaacttcgagaacaggtcgctcgtcaacaacaggctgtgcttaaacagtttggggctgggggatatggaggttcagataatatggttactgatgaggtagagcttcagc

SEQ ID NO: 13435 - DNA, 263 bp, Glycine max
  Clone ID: 701067103H1
gagagaatggctgcggccaacgttgttgagttcacagacttacccgtcaagaggccaagagaagacgaagaaggaatgcatggcgtctcaaacgacgccgtttcagcgctccccactgaccctcaataccctggcatctctgcggttattcccggttggttctccgaaatcagcccaatgtggcccggggaggcacattccttgaagatgtccaagattttgtttcaagggaagtctgactatcagaatgtcatggtcttcca

SEQ ID NO: 13436 - DNA, 123 bp, Glycine max
  Clone ID: 701067104H1
tgctatgtatacgttgtatcttcctggttgtagtgtattgccctttcttgcatttgtttttccccacaatactaatggtttgaacagcaattagacttctatatgaactgaagttgtttctct

SEQ ID NO: 13437 - DNA, 267 bp, Glycine max
  Clone ID: 701067107H1
caccgcacgaatatcttgttgtttggagcgatccgagacaaactctgtaaacatgttggtttaccaggacctccttacaggtgatgagcttctctctgactccttccgttacaaggaaattgagaatggaatgctgtgggaagttgaggggaagtgggttgttaaaggagcagttgatgtagacattggtgcaaacccttctgctgagggtggaggagaagatgagggagttgatgatgcagctgttaaggttgttgacattgttga

SEQ ID NO: 13438 - DNA, 266 bp, Glycine max
  Clone ID: 701067108H1
ctgatatttaggttggagagaagaaaagatgccgttgaaggtgttagaggcgacagtgtcgagtttcgatgtggtttttgagaagttccgatcagaggctccacaaaacaaggccaatctcatcctcttcttggcggacaatgacccggctacctctctcagctggtgccctgattgtgtgagagcagaacctgtgatatacaagaagctggaggcttcacctgatgacattgcactattgagagcttatgttggagatagaccaa

SEQ ID NO: 13439 - DNA, 268 bp, Glycine max
  Clone ID: 701067109H1
tatagcccaagccctatacaaccaaaccctaacacacacccatttgattcagtttccatggctagcctcaaggttgcatttttggctgcagtgctctgcatggttgtggtgagtgcacccatggcacatgcagctatcacgtgcgggcaggtgacgaatagcctgatcaattgcatcggttacctccagaacggaggaacgccgccgtcgggatgctgcaacggagtgaagagcctcaatgccgccgccaagaccaccgccgaccgcc

SEQ ID NO: 13440 - DNA, 266 bp, Glycine max
  Clone ID: 701067110H1
catttcactaatagagagacataagcataatattgagaaataatggagggttgtacttattgtgtgaagttgctatgccttgttgggtttgtggtgcttgtgagtactattgcaggggtggagagtgctggtgaatgtgggaaatctaccaccccagataatgaggcttataagcttgcaccatgtgcctcagcagcacaagatgagaatgctagtgtttctcagagttgctgtgctcaggtgaagaaaattgggcagaacccaag

SEQ ID NO: 13441 - DNA, 267 bp, Glycine max
  Clone ID: 701067111H1
catttgtactttcatcaaaacaaaatcccgttgtatttttctcagatggctcgaacgaagcaaacggcccgcaagtccaccggcggcaaggcgtcgcggaagcagctggcgactaaggcggctcgcaagtcggctccggcgaccggcggcgtgaagaagccgcacagattcaggccgggaaccgtggcgctgcgcgagatccggaagtatcagaagagcacggagctactcatccggaagcttccgttccagcgcttggtccgcgag

SEQ ID NO: 13442 - DNA, 80 bp, Glycine max
  Clone ID: 701067113H1
cagagagtggtttcagtgagtgatcggtgttcacttgatccttcataagtcgtcatcatcatcatgaccatcaccgttga

SEQ ID NO: 13443 - DNA, 268 bp, Glycine max
  Clone ID: 701067116H1
attacaatttcctgaattcatcttatgtgccagtcctaaaacaattggagtctgctaaccttcagagcttttacttcgagcacaagcttgaaaatgctacaaaggacacaaataatatgaagttcaggaaccccaaatatttgtcaatattgaaccatttgaggttctacttgccagaaatgtatccaaagctgcataaaattttgtttttggatgatgacatagtggttcagaaggacctaactgggctatggaagattgatatgga

SEQ ID NO: 13444 - DNA, 272 bp, Glycine max
  Clone ID: 701067117H1
tgtagaaagtgacagtggatgaacacaagagaaagaagaagaagaagcagaagaagaagaaaagcggtttgtgtgtgtcgaagtggataattccttccttcaattaatctccgatccgaaaccgtatggggattctatacgcactggtaggtcgcggatcggtggtgctggcggagttcagcggcaccaccaccaacgccagcgcaatcgcgcgtcaaattctcgagaaaacccccggcaacaacgacatgcacgtttcttactctcaggat

SEQ ID NO: 13445 - DNA, 270 bp, Glycine max
  Clone ID: 701067118H1
tctctctctctagacttagattttgtgaatggctgaagtggaagagggacaggtcatcggcgtccacaccgttgatgagtggaagctgcaactccagaatgcaaaagactccaaaaaactgattgtggtggattttactgcttcctggtgtggtccatgccgttttatggccccagttcttgcagagattgcaaagaaaactcctgaattgatcttcctcaaagtggatgtggatgaagtgaggcctgttgctgaggaatattccattga

SEQ ID NO: 13446 - DNA, 269 bp, Glycine max
  Clone ID: 701067119H1
tgtttgttaccttcatgaagaggtttatcaagaatttgactcccaagctcgatgcagagaaacaagagttgtttaagaagcacattgagggagcaactaaatacctgctctctaagattaaggatttccagttttttgttggggagagcatgaatgatgatgcttgcttggtctttgcatactacaaggatggtgctgctgatccaacattcttatactttgcatatgccttaaaggaggttaagtgctaagtgacataatgtaccaag

SEQ ID NO: 13447 - DNA, 168 bp, Glycine max
  Clone ID: 701067120H1
ctaattctatctgtaggaggtgtccttgaatttgattttatgcacaataaattatgaactggggatgtagtttgaagacataaaaatttgtgcacagtgatgtttgtaagatgcttaatttcagggcaatgctctgcttatcaatgtgttatatcttgttattgcccc

SEQ ID NO: 13448 - DNA, 266 bp, Glycine max
  Clone ID: 701067122H1
ctagagaagaagcttcttcttggttaccttgacagacagagagtggagcaaacgacaaatcagcgagttggaacattttgtgtttggtggagatgcctattcggagcttggtagaagtggagccaccaagcccactgagatacttgatcggcgccgccgttatgatgatcggagttgtgttaccagtcggttacatgatgttccgtaacaagcgcgtcccctcctcttcctcctactccaaacagacgtaggaacaaggttttgat

SEQ ID NO: 13449 - DNA, 182 bp, Glycine max
  unsure at all n locations
  Clone ID: 701067124H1
gtatatactcactaattggacaacccttctcctacctccatgtctacttncataactttcttcattcccctatttctaaccctccttttctcctctctcgtcactgccagttaccatcaaagcatctcttcatgccttctacgttctcgtgagaagctcacgcaccttcgcttctatttcca

SEQ ID NO: 13450 - DNA, 265 bp, Glycine max
  Clone ID: 701067125H1
ctttgagcttaaaccctagccgctcttctcttcattcttcactttggaaacaatcataatggcgttctgtaataaggttggaaatgtcttgaggcagggtgctgctcgcagcacacatgcccctgttgcgtccatgcttaattacatccgctgcatgtcttcaagcaagcttttcattggaggcctttcatatggagttgatgaccagtctcttaaggatgcattttctggctttggagatgtggttgatgcaaacgttataact

SEQ ID NO: 13451 - DNA, 264 bp, Glycine max
  Clone ID: 701067127H1
cgagtttgttgtgagctataagctagtttatcgtgaggagaatatgaagttgtttgtcttctttgttgctgcagtagttttggtagcatggccatgccatggcgcaggctaccaaaggttccctctccgaatgacaactggctatggtgagcgttcttcggaggtaaaatgcgcaagttttaggcttgctgtggaagcacacaacatccgagcctttaaaaccattcctgaagagtgcgttgaaccaacaaaggactacattaa

SEQ ID NO: 13452 - DNA, 264 bp, Glycine max
  Clone ID: 701067128H1
gacagcgccttgctaatcccatcctccctctttctctctctacattttaataggaatcaatttccaaccatgacggactcgaaacaagaacaggatatggagattgaagcattagaagctatactcatggatgagttcaaagaaatacactctggtgaaagtggcctaagtacttccaatcggtgcttccaaataaaggttgttgcgcaggatgacgatgaagatgggccaataactaatccagcacaactggctttgatcttt

SEQ ID NO: 13453 - DNA, 264 bp, Glycine max
  Clone ID: 701067129H1
ttccatttcaatgtcttcccattcgcacaaaggcacctccttctacggcgatgccgctccttatcgatccagagacgacgttaccactcgacccgtcgcatcctccgatcaactccaattgcacatcgatcccggcatcaacttcgatgacgaaatcaccggtcttcgtggccaagttaaaatattgataaatgttgctgaagagataggttcagaagtcaagtttcaaagagattttctggaacaagtgcaaatggtaatgat

SEQ ID NO: 13454 - DNA, 263 bp, Glycine max
  Clone ID: 701067130H1
ctgatattgacagttactgaagacaccacccttgtgaaataagccaatacaatggttctttcttataccaattccccagttagctcgatatcacctgcgaatcatatggtagctttactgctaccacattatggaatgagttatgagtacgtgttgcctatggaatgaatgaatacctgtaactaactatggaatgaatacatgttgcctatggcatggactctaggataccagaaactcactgatcatccgtcaaatcttat

SEQ ID NO: 13455 - DNA, 267 bp, Glycine max
  Clone ID: 701067133H1
caacaacgcttaacctctctcattccccatttcctcacctccttcaaccgctgctaaattctagggttccgaaatggacgctggcggaaagatcaagaagggcgccggaggtagaaagggcggcggcccaaagaagaagccggtttcaaggtccgtcaaagccggtctccaattccccgtcggaagaattggccgttatttgaagaaaggaaggtacgctcagcgtgtcggtaccggtgctcccgtatacttggctgcagttctcga

SEQ ID NO: 13456 - DNA, 252 bp, Glycine max
  Clone ID: 701067134H1
tggtggggagcatggtggtggatatggcggtggtgaaggaggtggagcaggtggagggtatggtgcaatggagaacatggtggtggttatggtggtggtcaaggaggaggaagtggaggagggtatggtgctggtggagatcatggtgctgctggctatggtggtggagctggaggtggagctggtggaggctatggtgcaagtgtcccctttcgcgtatcaagaataataagtatgctattaataacagga

SEQ ID NO: 13457 - DNA, 269 bp, Glycine max
  Clone ID: 701067135H1
actcgagcgaatcggctcgagatcgaagcaaaagccaccgcactaagaggcagaagcactaagtacaagagcagcagcatgatgagaggagcagcagccctgtgcagctttccaagtttttagggcgtgacaaagatgacggtgtccgtcgcagtgctgtatctggcaagaagattcttctgaaacttgagaaaacaaaggaagataaagtggctgaaagcaagtagaaacgaactgctgaactttttaaatgctagttttgattagca

SEQ ID NO: 13458 - DNA, 266 bp, Glycine max
  Clone ID: 701067137H1
ccgacgatgcctcccgtcgctcctcgatccggcgatgccatattcgccaacgtcgaacgcgtcaatgcggagctgtactatttgacgtatggcgcaattgtgcgtcaattgctcacggatctggaagaggttgaggaggttaacgagcagcttgatcaaatgggttacaatattggaatccgattgattgatgagtttttagctaagtctaatgtctcaagatgcaacgatttcagagagactactgatgtaattgcaaaggttgg

SEQ ID NO: 13459 - DNA, 262 bp, Glycine max
  Clone ID: 701067138H1
tctggaaaactgcctttaccattggatatggcttgccacttggggacttcttatttggatcggatggaaagcgcttccttaacatctcttttggtgcccctattaatgagttggtcattgacacactatttgtgaaggttgttttgccagagggttctaaagatatttcagtgtctgttccatttcctgtgaaacaatcggaggagacaaagctttcccacttggatattgttggtagacctgttgttgtgctggagaagaa

SEQ ID NO: 13460 - DNA, 264 bp, Glycine max
  Clone ID: 701067139H1
gattggggagcttcagtctcaattttatagccatcaaagtagtgaagtaattggggttgcaggtctatcatgtacaggataaaatgccaaggagtttgtctagaggtgatgcggaaactacaaaaattgagatacaagactttttccttttcagatttgaaggatgaaggatgggttgagttttggctttggtcactgactcaggtggtagtttaggtatcctctgaaataaaacgaacaagaaatagtttttgcgaactactg

SEQ ID NO: 13461 - DNA, 262 bp, Glycine max
  Clone ID: 701067140H1
ctcagcgagcgaggttcgtgaagcaactgggtttggaaccactttcatgatggacaatgttttgaccgaggggtcagagctgagctcgaagcacgttgggagggctcaggggctgtttggcttggcctctttggaggaccgtggaatggtgatgctcattaacttggctttcagtgagggtgagtatgctggcagcactctcagcatgcttgggaggaaccctgttcaggacactgttagggaaatgcccattgttggaggc

SEQ ID NO: 13462 - DNA, 265 bp, Glycine max
  Clone ID: 701067141H1
caacaacgcttaacctctctcattccccatttcctcacctccttcaaccgctgctaaattctagggttccgaaatggacgctggcggaaagatcaagaagggcgccggaggtagaaagggcggcggcccaaagaagaagccggtttcaaggtccgtcaaagccggtctccaattccccgtcggaagaattggccgttatttgaagaaaggaaggtacgctcagcgtgtcggtaccggtgctcccgtatacttggctgcagttctc

SEQ ID NO: 13463 - DNA, 260 bp, Glycine max
  Clone ID: 701067142H1
ctggtactgtgctggtggggagcatggtggtggatatggcggtggtgaaggaggtggagcaggtggagggtatggtgcaagtggagaacatggtggtggttatggtggtggtcaaggaggaggaagtggaggagggtatggtgctggtggagatcatggtgctgctggctatggtggtggagctggaggtggagctggtggaggctatggtgcaagtgtcccctttcgcgtatcaagaataataagtatgctattaataa

SEQ ID NO: 13464 - DNA, 266 bp, Glycine max
  Clone ID: 701067143H1
cctcgagccgaatcggctcgagatcgaagcaaaagccaccgccacaagaggcagaagcataaagtaaaagagaagcagcatgatgagaggagcagcagccctgtgcagctttccaagtttttagggcgtgacaaagatgacggtgtccgtcgcagtgctgtatctggcaagaagattcttctgaaacttgagaaaacaaaggaagataaagtggctgaaagcaaggagaaacgaactgctgaactttttaaatgctagttttgatt

SEQ ID NO: 13465 - DNA, 260 bp, Glycine max
  Clone ID: 701067145H1
ccgacgatgcctcccgtcgctcctcgatccggcgatgccatattcgccaacgtcgcacgcgtcaatgcggactgtttactttgacgtatggcgcaattgtgcgtcaattgctcacggatctggaagaggttgaggaggttaacgagcagcttgatcaaatgggttacaatattggaatccgattgattgatgagtttttagctaagtctaatgtctcaagatgcaacgatttcagagagactactgatgtaattgcaaag

SEQ ID NO: 13466 - DNA, 261 bp, Glycine max
  Clone ID: 701067146H1
tctggaaaactgcctttaccattggatatggcttgccacttggggacttcttatttggatcggatggaaagcgcttccttaacatctcttttggtgcccctattaatgagttggtcattgacacactatttgtgaaggttgttttgccagagggttctaaagatatttcagtgtctgttccatttcctgtgaaacaatcggaggagacaaagctttcccacttggatattgttggtagacctgttgttgtgctggagaaga

SEQ ID NO: 13467 - DNA, 261 bp, Glycine max
  Clone ID: 701067147H1
gattggggagcttcagtctcaattttatagccatcaaagtagtgaagtaattggggttccaggtctatcatgtacaggataaaatgccaaggagtttgtctagaggtgatgcggaaactacaaaaattgagatacaagactttttccttttcagatttgaaggatgaaggatgggttgagttttggctttggtcactgactcaggtggtagtttaggtatcctctgaaataaaacgaacaagaaatagtttttgcgaacta

SEQ ID NO: 13468 - DNA, 262 bp, Glycine max
  Clone ID: 701067148H1
ctcagcgagcgaggttcgtgaagcaactgggtttggcaccactttcatgatggacaatgttttgaccgagggtccagagctgagctcgaagcacgttgggagggctcaggggctgtttggcttggcctctttggaggaccgtggaatggtgatgctcattaacttggctttcagtgagggtgagtatgctggcagcactctcagcatgcttgggaggacacctgttcaggacactgttagggaaatgcccattgttggaggc

SEQ ID NO: 13469 - DNA, 264 bp, Glycine max
  Clone ID: 701067149H1
cgcgtccttcttgtttcacaagtttccttggaagcggacgtattaccctctctccctttcttctattttctcattcctgcctctcttctcaacatggccgccaacagatggttgacacctgaggtatacccactcttcgcttcagttggtgtggctgttggaatctgcggtatgcaacttgttaggaatataaccaccaatcctgaagtcagggtgaccaaacagaacagaactgcaggaattcttgagaattttgcagaggga

SEQ ID NO: 13470 - DNA, 264 bp, Glycine max
  Clone ID: 701067152H1
tcaacctctgcagcgccttcgatccagataacatgactaacgagaacaaagaaggctggcattgttggaaaatacggtacccgctatggcgccagtctgcgtaagagagtaagaagatggaagttagtcaacacagcaagtttttctgtgaattttgtggaaagtatgctgtgaagaggaaagctgtgggaatatggggatgcaaggactgtggtaaagtgaaagctggcggtgcttacactttgaataccgcaagtgccgtga

SEQ ID NO: 13471 - DNA, 263 bp, Glycine max
  Clone ID: 701067153H1
cccacgtttcctctgtcacgaggaacagcgcagaacctaaccctcacgaaaacccctttcgattccgataactctcgttgtgccgaaaccctaaccttaaccgggttttctcgttggttgggattgaattggcatcggagggaggcgatcgattggaaaattggtagtagtagtttagcgttgaagaacgatgtctgctgctgtgtgcggaagcaagagatctttcttcgaagagcttcctccttctccgccactctccaaga

SEQ ID NO: 13472 - DNA, 262 bp, Glycine max
  Clone ID: 701067154H1
cagaagagtgtcgcagttgtaaccctaatcagaagacgcgcagttcaagcgagtgacagccaccagccatgggtcgtatgcacagccgcggtaagggtatatcctcttctgctttgccctacaaaaggacacctcctagctggctcaagatctcttcgcaagatgtcgaagaaaatatctgcaagtttgcgaagaaaggtttgaccccgtctcagattggtgtcattctcagagattctcacggtattgctcaggtcaatag

SEQ ID NO: 13473 - DNA, 261 bp, Glycine max
  Clone ID: 701067155H1
cttaggagtgtgaagccctttggatggtcctatgcagtttcacaggtgttgactgagaaggctgtgcttgaatttggagaacagaatgggttggaagttgcaactgttattgctcctttcattgttggtcgttttgtttgtcccaagcttcctgactccattgagaaagctctgcttatggtgttgggcaaaaaggaagaaattggtgtcattcgttaccatatggtacatgtggatgatgtcgctagagcacatatcttc

SEQ ID NO: 13474 - DNA, 258 bp, Glycine max
  Clone ID: 701067157H1
caggaattgagggcattggcgcagaaggcacggtctgaaagacttggaggggagagaattggggttgtaccagccggggcaccagctgtggcggtggatgaggacgatatgagagttgattatgagcatgagaaggagaatccgagggagagggatagggagaggagttttgtgaaggagagtagggaggagaaggaggagaggatgcagcgcgagataattcgtgaggagaggaggaaggagagggagagggagagg

SEQ ID NO: 13475 - DNA, 255 bp, Glycine max
  Clone ID: 701067162H1
cgggatacagaattgttggaatcattggagaccaatggagcgatctgcttggagaccacagaggcgaaagcaggacctttaagcttcctaatcccatgtactacattgagtagtaccttcacctctctcaacaatctagctagagtttgctcctatctatatgtaataaggtatgctgatatgcactattcaaataggagcattagctatgtttgttaatgtcactttatgttatgtgggtaagtcacctaagac

SEQ ID NO: 13476 - DNA, 261 bp, Glycine max
  Clone ID: 701067166H1
tttgtttgttccatctcttgcttcttgcttctattacttgcttctttcttcaccatgtcacttgctgggaaaatcaccactgaaattggggttcatgcaaccgctgcaaagtggttcaacctctttgcaacacaacttcatcatgttcaaaaccttactgatagagtacatggaaccaagctgcatcaaggtgaagactggcatcacaacgagacagtcaaacactggacttataccatagatggtaaggctacaacatgt

SEQ ID NO: 13477 - DNA, 260 bp, Glycine max
  Clone ID: 701067167H1
ctgagttctaccttgggcagagagatggtggtgactactggacttctgatgccggtccattagaggcatttaagaggtttggcaagaagcttgaagagattgaaaagaagcttatagagaagaacaaagatgagacattgagaaaccgctatgggccagctaaaatgccttacactctgctctatccttctagtgaggagggattgactttcagaggaattcccaacagtatctctatctaaggaccctatggttgctta

SEQ ID NO: 13478 - DNA, 261 bp, Glycine max
  Clone ID: 701067168H1
caattttcccatattattcacagaaaggctaaaagggccctataaaactaaacgctccccttctcgaagaggccgctcgctctctagggtttttctttttctcttctcactgcatcgcttcaggttcttctgaaaagatgtctcgcgtgtatgttggtaacttggattcacgagtcactgagagagatctcgaagacgaattccgcgttttcggagttattcggagtgtttgggttgcacgtagaccacctggttatgctt

SEQ ID NO: 13479 - DNA, 144 bp, Glycine max
  Clone ID: 701067169H1
cgactcgtttgatttgggaatgggatttggctatgagtgtgatacgaccgaatacgctgcgtttggtggacttttcgatcattcggatttgtattatgactcgtggcggcacgagaccttgccaacacaatagaagatttaatg

SEQ ID NO: 13480 - DNA, 255 bp, Glycine max
  Clone ID: 701067171H1
cggactagttgtggctgtggaagcagtgagtgatgcattggaaactctgaaggatggagcagtgagtggagcagaatattggtcatcgtggttgctttatggtgtgggagctgaagctgatgtgaagacaattggtgttgctgggtcaccgaggtttgaggtttatggtagtgactttggttggggaagaccaaagaaggtggagatggtgtctattgaaaaaactgcagtctttggtctttcagatagcagaaa

SEQ ID NO: 13481 - DNA, 133 bp, Glycine max
  unsure at all n locations
  Clone ID: 701067173H1
gtacgtacgtctgtattcgtttcgagcgtatattgcgattcagacatagagaatgtttatngntcgaagattcgnttcgttatgtnttaggatcgtgtccaacaggaacatgtgccttcaacatctgttggat

SEQ ID NO: 13482 - DNA, 262 bp, Glycine max
  Clone ID: 701067181H1
gttggcagtttttcttagaatgaaaatgtcatctaaggtcactggtgccaccctttgcctagcagtcttattcctcttcttaaccttcacatatgcaggaagacttggccctgcatcttcctctatcacttcaatcaaaactcaacatggggttttggaagaggagaagttggacgtggaggaaacttgtgatggtattggtgaagaagaatgcttgatgagaagaacacttgtggctcacacggattatatctacacacag

SEQ ID NO: 13483 - DNA, 263 bp, Glycine max
  Clone ID: 701067182H1
ctactatatatggtcattttcagatagctttgaatgggatgctcgttacacagctcgatttggcatcatatatgtggattacaagaacaatttgagtagataccctaagtcctctgcgttttggctgaaaaaattccttctcaagtgatctaaatctattgttcctttggcatgcatgcccagtttttcttcttgtttgtttcctggatatcacagacatgcagtgtgtatcacttgctcttcgattcggatcaatgtaatca

SEQ ID NO: 13484 - DNA, 261 bp, Glycine max
  Clone ID: 701067183H1
tttgctttctctgtctggcaaagtgcaccatgtacgatggttggatttgttcctcgaatgcactggctggataaggagcaaaataatgctgcatattacaggtatggaggatggtggtctgtctggtggatgggcacttatagcatggttctctcaaaggctgcattctttcacaggaaatacttggatttatatactcatgagatgtctccatcaattcaggactatgtttccagggagagaattgtgaagacattgcaa

SEQ ID NO: 13485 - DNA, 93 bp, Glycine max
  Clone ID: 701067186H1
ctcgagccgcaagcttccagggaagaccaggttccccatctcacaaatcagtgtgatgggttttgtgtattgtgatttctgctccaacaacag

SEQ ID NO: 13486 - DNA, 260 bp, Glycine max
  Clone ID: 701067188H1
ctcattaacatgcccccctcgtctatcatccccctccataatcatcctggaatgacagtattgagcaagctgttatatggctcgatgtatgttaaatcctatgattggattgatgcacctgagcccaatgatccatctgaagctagacctgcaaagcttgtcaaagatactgagatgacagcgccgagtcccacaacggttctctatcccaccagcggaggaaacatccattgtttcagagctataactccttgtgcaat

SEQ ID NO: 13487 - DNA, 256 bp, Glycine max
  Clone ID: 701067191H1
caccttctatgcttgaagacggtggattagaacctcaacaagagaaagagactcgtcagagaatatgatccttgcggtgctgtttgccaacgctgagggcaatatcctcatcgaacgttttcatggagttcctgcagaggagcgtctgcactggcgttcattcttagtcaaactaggagctgataatcttaagggtgtcaaaaacgaagagctcctagttgcttgccacaaatcggtttatattgtatacacagtg

SEQ ID NO: 13488 - DNA, 258 bp, Glycine max
  Clone ID: 701067192H1
ggggtaatgcatagagagtagatctgtcacggagcgtatagtcgccggcgacggcgagcggtgcactttaaccgcgattaacgatgattaaccttcgccgcagcggcgaaaacatccctgcgaaatcgaagcgattcaaacgccaattggtgaagttcgaggagctgccggagtacttcaaggacagcgagttcatattggactattaccgctccgaatggcccgtgaaggaagccttgtggagcatcttcgcgtggc

SEQ ID NO: 13489 - DNA, 258 bp, Glycine max
  Clone ID: 701067193H1
cccagagtctgagtcctctgagactttccttcagtccttcaccttctttctctctaggcgcaaaacctcgtactgtttgtggcggctaaggatgtcagggaaaggggcgaaggggttgatcacaggcaaaacctccgccgccaacaacaaagacaaggacaagaagaaacccatctcgcgttcttcacgtgccggccttcagttcccagttggccgtatccaccggcttttgaagtcaaggacaaccgccaacggtag

SEQ ID NO: 13490 - DNA, 259 bp, Glycine max
  Clone ID: 701067195H1
cacacattaacctttctcattccccatctcctcaccttattcagccactgctaatttctagggttccgaaatggacgctggcggaaagatcaagaagggcgccggaggaagaaagggcggcggccctaagaagaagccggtttcaaggtccgtcaaggccggtctccaattccccgtcggaagaattggccgttatttgaagaaaggaaggtacgcccagcgtgtcggtaccggtgctcccgtttacttggccgcagtt

SEQ ID NO: 13491 - DNA, 258 bp, Glycine max
  Clone ID: 701067196H1
ttctttctctctctttctctgtttttctttttgtccctctctctagatttcatttgttgttcttcttctttatgagccctaactcggggacccatcgtcgtcgtcgtctttagccatgtcgctgaggaaggtcttccgctcccgcaagttctccagatcgttcaaggaggtgctgccggcggagggcgccgcacttgtcggcggcgaggacggggtcgccggcgccggtgaggagtcgtcgaatgggaataatggttg

SEQ ID NO: 13492 - DNA, 283 bp, Glycine max
  Clone ID: 701067202H1
gctcggacttcattcataccgttcgcaacacgatcactgttctgcgacgatggtggcacattcgagttcttggggaagggcatcgtcgcgatctcggcctacaccttctccgccatcgccatcgccgtcgctatcggcgtctccgtcctcggcgccgcctgggggatctacatcaccctaagcagcttaatcggcgctgcaatcagggcttctcgagtcacttccaaaaatctcattactgtaatcttctgtgaagctgttgctatatatggtgttattgtgg

SEQ ID NO: 13493 - DNA, 275 bp, Glycine max
  Clone ID: 701067203H1
tcgatgagaaagatagagagatagtgtgtgcagaagatgtggctattcggcagaaaaggggcttctgggttttcatcatcatccactgcagagcaagtcactgaaggaattgatggaactggtttcactgccattgtcacaggggcatccagtggtattggcactgagactacgcgtgttcttgctttgcgtggtgtccatgtgattatgggtgtgagaaatatgcttgctgctaaagatgtcaaagaaacaatactcaaggagattccctccgc

SEQ ID NO: 13494 - DNA, 277 bp, Glycine max
  Clone ID: 701067204H1
cagagagagaaaagcgtgaatcatgtcggacgaagagcatcacttcgattctcaggcggatgcgggagcgtccaagacgtatcctcagcaggctcgtatcattcgcaagaatggctacatcgtcatcaaatccaggccttgcaaggttgtagaggtctctacgtcaaagacaggcaagcatggacatgcaaagtgtcactttgttgcaattgatatttttaatgggaaaaagcttgaagatattgttccatcatcccacaactgtgatgttccacat

SEQ ID NO: 13495 - DNA, 278 bp, Glycine max
  Clone ID: 701067205H1
ataggcgaaggactttaggttgggatttgggaattagggttattcgcgtggcgaagatgattgacgtggttttgaacgatcgattggggaagaaggtgcgcgtgaagtgcaacgacgatgataccatcggcgacctgaagaagcttgtcgcggctcagactggcacaagagccgacaagatccgcatccagaagtggtacaccatctacaaggatcacatcactctcaaggattacgagatccatgacggcatgggtctcgaactctactacaactaa

SEQ ID NO: 13496 - DNA, 54 bp, Glycine max
  Clone ID: 701067206H1
ctgaaatccattatagaaagtttgactccattttgataatggatttggtattct

SEQ ID NO: 13497 - DNA, 274 bp, Glycine max
  Clone ID: 701067207H1
ctttcttttgtacacagtacagtgtggaaagtattatttggaaaggtagctgattcactggagaaaggaactgaacatgaagatgagtacatgatcagtgaaaaggagctcctagtaaacaaattcatttctatcccaaaggacatgggaacgtttaactgtggagcatttgttgctggaatagtacggggcgttttggatggtgccgggtttccagctgttgtaacagctcattttgtcccatggaaggtcaacaacgaccacggacaacaat

SEQ ID NO: 13498 - DNA, 275 bp, Glycine max
  Clone ID: 701067208H1
tgcttttgttcttactctgggatgttctcgcatacgatgcaagcatctttttttactacactgagtggactaatcatattggttaccatatattttgcgttggggaccattgtatctgctcatggatgttggcggtgctttaataaacccctcattcacaatggagcaaaggctgagtttctgagaagggatgtagaagagacaatgtctacaaacttaatcgcttccaacaagttggaaagccatatgttgaagaggactttcaacaaagagca

SEQ ID NO: 13499 - DNA, 279 bp, Glycine max
  unsure at all n locations
  Clone ID: 701067210H1
catcagtttcagctgccatggcttccaactccgtccgagttttcgccgctcagatgacatccatctagtgactctctngccagtttggccacttgttctcgtctcatcaaagaagcagcatcacttggagccaaattgctttgctttccggaggccttttcttacgtgggtactaaggatggcgacagtgttcgtgttgctgaaccattggatggaccaattatgagccactactgctctttggccagagaatccagcatttggttgtcacttggaggc

SEQ ID NO: 13500 - DNA, 282 bp, Glycine max
  Clone ID: 701067211H1
ctagcaatgggcggtatactttctgcgcttcttggcggcgacgcggcggcggcggcgtcgttcgccggaagagttccagttcctacggcctcctccttccactcgtcgccgcgctggcagctctacttcaacgagatcaaagataccgataagctcgttgtgatagatttctcggcgtcgtggtgcggtccttgcaaattcatagagccagcgattcacgccatggccgacaagttcaacgacgttgacttcgtcaagatcgacgtcgacgaattacctgat

SEQ ID NO: 13501 - DNA, 72 bp, Glycine max
  unsure at all n locations
  Clone ID: 701067212H1
gttgtagttaagcaagtatttgcacacacggtacgaaatagnnatcgtgtttgcattggagagagagagaga

SEQ ID NO: 13502 - DNA, 100 bp, Glycine max
  Clone ID: 701067214H1
gctctctctgcatgatcatgtacaactacaagcatgctctctgtagttttcaacctggtgcgcttgcaggggttgtaaaactaatccataatatttaatt

SEQ ID NO: 13503 - DNA, 268 bp, Glycine max
  Clone ID: 701067215H1
cgtggtggtggtgaccgtggttactctcgtggtggtgacggtggtgatggaggctggagaaactaagggttgatgtcggtgaataagggttaaggataagccccgtaaatttaggtggggtttgagtttgataaacttaatggttttgtgtcaccgtggtcctggtttttgacaataaaacctggttgttaatagtcgatttaatgaaatgataatcggaatttggagtaaaaaaaaaaaaacagccaggactgacgacgtcgcgaag

SEQ ID NO: 13504 - DNA, 274 bp, Glycine max
  Clone ID: 701067217H1
ggctcgttttgcatgctcagtttgggactctccaatctctacacacccctcaaaacggggtgcgttcaatctctcttacgatccaagttgggtattcgaacccagtcgtgcatcagaatggaagggagtaacaccaccgtgcccagcattgttgtctatgtcactgttcccaacaaagatgcaggtaagaagttggctgaaagcatcgtcaaagagaagcttgctgcttgtgtcaacagggtaccgggtattcaatcggtgtaccagtgggagg

SEQ ID NO: 13505 - DNA, 277 bp, Glycine max
  Clone ID: 701067219H1
tcttgcgactaagagttgctgcttcttccgccactcagcacttcgctccctctgtgcttcaccaaccatggccgaaatcgaagctacccgtcccagatccctctcaaatcgacgtcaaacttttcaaccgctggagcttcgacgacgttgaggttactgatatgtctctggctgattacattggagtgtccccgtcaaagcatgctacatatgttcctcacactgctggtaggtactcagtgaagaggttcaggaaggcgcagtgccccattgttga

SEQ ID NO: 13506 - DNA, 78 bp, Glycine max
  unsure at all n locations
  Clone ID: 701067220H1
cgtcacataanaaaaaaaaataaactggggagaagcatgttgttgatgttgggactatgcttcctattgttctctgca

SEQ ID NO: 13507 - DNA, 275 bp, Glycine max
  unsure at all n locations
  Clone ID: 701067222H1
ctttattgcaagactggcacttcgttgcttggtgatgtccctttctgttctcttcactcttggtcttgcgagagaaagccatgccagacacgaagatttttggcatgctgtttggccaaacactcccattccaagttcattgcgagatcttctaaagcctggccctgcaagtgttgcaatcgctgatcaccctatgcaaattgaagaaacacagtacccgaaaaccttcttctataaagaagaccttcatccaggcaaaacaatganagtacaat

SEQ ID NO: 13508 - DNA, 277 bp, Glycine max
  Clone ID: 701067225H1
atgctagttagaacaagatgttgcagctactctacactgcgattttctccgaaatgcttttgattctcagggttcgttttcaaaacccaactgagaaaactcgtcatcgtttccctcgatagtgtgaagcgcggtcgcggtcccgtggtggtttccaccgtgggcgccacattgatggtggttctcgcttcgagtctctacagcatggccaagatccagcaacgcaccctcgaggccggcatagtcaaccccaccgaccaagtcgtcatgtccaagc

SEQ ID NO: 13509 - DNA, 277 bp, Glycine max
  Clone ID: 701067226H1
tttaatttacttttgttctgaatgtcactcaatctatggttaggaatttacgagagatgttgatatagaaaggtaaggttaacccattggccaaggaatatatggcgttttctatggttttcattgttagcaacattatgctgcttttcagttcagcatttgccaaaactgctagtcctccctctctgagcccaactccagcaccagccccggcacccgactacgtgaacctcaccgagttgctcagtgttgctggtccatttcacaccttccttgg

SEQ ID NO: 13510 - DNA, 279 bp, Glycine max
  Clone ID: 701067227H1
ttactggtgaaggataaaattgaagcgcagaaccaagtgaaggctaaagaacaagaagagaaggaagtaatttgttcaccagattatgtatgctcagttgttgcctcttgctttgcccgcaccaccaatgcctggaatgggaggaggctttgcgcctccccctccaatgggtggattggggatgcctccaatgcctccttttggaatgccacccatgggcagctactgacatataagttctcggcaatgaactcaagtgtataccgagagcagcgtaca

SEQ ID NO: 13511 - DNA, 278 bp, Glycine max
  Clone ID: 701067228H1
cggtttgtagtgtagcaggaagaagcagcaatggcgccgaagataacacgtaaggttagcagaaaccctgaatttgatagggggattcggaaattactcgaggtcgcagatgtaccacaagacgggcatttgggctatcaaggccaaaaaccgtggcgttttacctcgccacgaccctaaacccaagcctgaagctcctgctgaaaaaccacccaaattttaccctgctgatgatatcaagaagccccttgtcaacaagcacaaaccgaaaccagcta

SEQ ID NO: 13512 - DNA, 282 bp, Glycine max
  unsure at all n locations
  Clone ID: 701067230H1
acgagttcctngaaaatttgctgaatgaccttgttgacattctnggagaagaggctcaggctgcaaaaactgatccggagacaattccaacctcctgaaaaggctgttaacgggcccaagaatggtcaagctaatggtgttcacaaagagcctttagtcacttgggtacacaaaaattttcaggcaatactcaccaatgagccaaggtgcttgccatgtgagacagtgacagctggagatgaacatttttggacttgggtcttgatatacagcaaacagttc

SEQ ID NO: 13513 - DNA, 139 bp, Glycine max
  Clone ID: 701067232H1
ccctaacaacacacgcgcagacgcaaacgcaaacgcaaacgcaaacgcaaacgcagagcgtgatccattgacgaagatggtgcaacgtctcaactaacggaaaccggaaaggtaatgcaacaagttcaaccaacacagg

SEQ ID NO: 13514 - DNA, 111 bp, Glycine max
  Clone ID: 701067234H1
tatcttttgaaaactccttccgctggcttactagtgagtctgattttgttgcttcacttatgtcttctttgttcccaaatgaacttattgcctgaaaatgcttcgattagc

SEQ ID NO: 13515 - DNA, 272 bp, Glycine max
  Clone ID: 701067241H1
aagagagaagaaaagtcaaagacaatgtcagggctcattcacaagattgaggagacccttcatgtgggaaggcaaaagaaggaggaggagcacaagggtgagcagcaccatggtggagaatacaaaggggagcatcatggtgaacacagtactgaatacaaaggagagcatcatgttggtgagcacaagccggctcaccatggaggagaagagcacaaagaggggttcctagacaagatcaaggacaagatccacggcgaggagggtggcgc

SEQ ID NO: 13516 - DNA, 95 bp, Glycine max
  Clone ID: 701067244H1
gcagtaagaggtgttgagtaggtttggtaccttgtatttgttgtgctatggcgcctgatggtgccgccggcaagtggaaaaaggaaaggaggtaa

SEQ ID NO: 13517 - DNA, 284 bp, Glycine max
  Clone ID: 701067248H1
catagagccgcttaaggagtaactggctaggaacagataggcggagggtgacagtaaaggatctggtagtagtggttgaggaccatgtaaaacaggaccaggtgggcttggccggccaaaatcctcagctgctccatcagggtccgctgaactatatgggttggcaggtgaaaccacaacatctggttatgcctgcaatgcagagccatgaatggttaggatgcttctaggcatctaattaatttcccttaaatgcttgtacgcatggcatgggtggaacaatt

SEQ ID NO: 13518 - DNA, 267 bp, Glycine max
  unsure at all n locations
  Clone ID: 701067251H1
gagaggtgccataaggctttctgcgctgtctgaagctggggttatttatgtcatgacccatgattcaataggacttggagaagatgggccagtccacaggctattgagcacttagcaagcttccgggcaatgccaaacattttgatgcttcgtcccgccgacggtaacgaaacagccggagcatacaaagtggccgtgctcaacaggaagagaccctccattcttgccgtatccaggcaaaaactgccccagcttcncggaacttcc

SEQ ID NO: 13519 - DNA, 270 bp, Glycine max
  Clone ID: 701067253H1
ctcaaaattggcaaagccaagtctgatgctcttttcaagaccgttgaggcttaccttttggcccatcctgattacaactgatcctcttcatcactattcagtcagcaacgaccttgctttatattatatacaagagttttcttgccttgtgtggagctttatccaatcactgtgtgtggtgtgtgcttaagttaaaaacttgccttccaattaatgtaacgagtgtttcctttctcatttccttttgccacagaattgtgagagtcagtt

SEQ ID NO: 13520 - DNA, 268 bp, Glycine max
  Clone ID: 701067255H1
gagagaatcgctgcggaaaacgttgttgagttcacagacttacccgtcaagaggccaatcgaaggagaagaaggaaccaatggcgtctccaacgacgccgtttcaacgctccccaatgaccctcaataccctggcatctctgcggttattcccggatggttctccgaaatcagcccaatgtggcccggggaggcacattccttgaagatggaaaagattttgtttcaagggaagtctgactatcagaatgtcatggtcttccacacaa

SEQ ID NO: 13521 - DNA, 271 bp, Glycine max
  Clone ID: 701067259H1
atttgctactgagtttccacactgcataccttaagtcttccgaattcgaagttaatttgcaagatcggtaagggaaaaggtccgaatcaacattgtggtggttggtcatgtggaccctgaggaggcaccaccattaacgagctgaagaagcctgttgtggagaaagaagctccagggcatgccatatgagggcatgcacgtacggcctcggaggggaaccagaaaattatgttaacaaaataatctggaaccctaatgtatcagtgtcatc

SEQ ID NO: 13522 - DNA, 129 bp, Glycine max
  unsure at all n locations
  Clone ID: 701067263H1
ccntgctaaggagtacgaggaagtgctgctaagcttgggagttcctggcagtgaacctggaagtgatggagaagacattggtccacagggaaagggaaatgttgccacacccatattattaggaccaag

SEQ ID NO: 13523 - DNA, 267 bp, Glycine max
  Clone ID: 701067266H1
atcgttcgctcttcctctcccagacaaacacatgggattgcccaatcagcaaaccgtcgattaccccagcttcaagctcgtcatcgtcggtgacggtggcaaaggaaagacaaccttcgtgaaaaggcatctcactggtgaattcgagaagaaatatgaaccgaccattggtgtggaggttcatccgttggattttttcagtaactgcggaaagattcgattctattgttgggatactgctgggcaagagaagtttggcggcctcag

SEQ ID NO: 13524 - DNA, 266 bp, Glycine max
  Clone ID: 701067268H1
atttttctcttctcactgcatcgcttcaggttcttctgaaaagatgtctcgcgtgtatgttggtaacttggattcacgagtcactgagagagatctcgaagacgaattccgcgttttcggagttattcggagtgtttgggttgcacgtagaccacctggttatgcttttattgactttgatgaccgcagagacgcacaggatgctatccgtgaattggatggcaagaatggttggagggttgagctttctcacaactctagaggtg

SEQ ID NO: 13525 - DNA, 117 bp, Glycine max
  Clone ID: 701067270H1
ctcaaagaacctcttcaattcttgtcatctctggtcattgggaaaccgcagttcccacggtcaacgtcgttgactccatcaacgacaccatctacgatttctatggcttccacacaa

SEQ ID NO: 13526 - DNA, 64 bp, Glycine max
  Clone ID: 701067273H1
ctaaagacaaggtttcagcttcctgaccttgacttttctcctctcttcctcttccacacaacat

SEQ ID NO: 13527 - DNA, 268 bp, Glycine max
  unsure at all n locations
  Clone ID: 701067275H1
ctaaactctgcaaacatgttggtttatcaggacctccttacatgtgatgagcttctctcggactccttccggtagaattgaaattgagaatggaatgctgtgggaagttgaggggaagtgggttgttaagggagcagttgatgttgacattggtgcaaacccttctgctgagggtggagaagatgagggagtcgatgacgcagctgttaaggttgacctncttgttgatacattcagacttcaggagcaacccgcttttgataagaaa

SEQ ID NO: 13528 - DNA, 273 bp, Glycine max
  Clone ID: 701067276H1
gcagaaggagcaaaagcaatggcgccgaagaagccgagaaccacgacaaggaaccctcatttggttaggggggatgggcagttattggagttcgcagatgtaccacaagacgggcatctgggccatcaaggccaaaaactctggcgttttgccccgccacgatcccaagcccaagcccgaggccccggcccagaagccgcccaagttctaccccgcggacgatgttaagaagcccctcgtcaacaagcacaagcccaaacccgcgaaactcag

SEQ ID NO: 13529 - DNA, 279 bp, Glycine max
  Clone ID: 701067278H1
cgaagatgcaaagtcaacaaacagtgaaagaagaagatgatgaaggtccacctccgggatggcaatctctccccggttaaccaacggcaacggcaagttcaatccggttgggctcaaatggtttgcggttcttgtcgtcgcctgctttcatatccacgaggtgccaaacatgtcaaatgttcatgctgtcagactgtcaacattgtattagaagctgatcaggttgggcaagttaggtgtggcagttgtgcggtattgctgatgtacccatatggtgct

SEQ ID NO: 13530 - DNA, 95 bp, Glycine max
  Clone ID: 701067279H1
tggtcttgcatgaatgcccggcgtcgaaatgtgggtccatcagtaaactctaaaactgaggacttaactgaaacctctctaatattcggggggag

SEQ ID NO: 13531 - DNA, 70 bp, Glycine max
  Clone ID: 701067280H1
cagatctgctcctaccgttccccctcacaaaatcagttagaagagcatgggacgtggagttagcagtggt

SEQ ID NO: 13532 - DNA, 264 bp, Glycine max
  Clone ID: 701067282H1
ctagaaagttagaccacctaccagaaagctgaagaccacatacaaggccaaaaagcccaacttgtttatgtaacgtggttgatgaatgagttacaaatacttggtgtctatcaggcgtttttagtagagacgtacccgttggttttttactgccagattttgtttgaggttcttttacactattttcattgggtttatctttatgtttctgttggatattatcttttgatcattttgataattgagtagaattgaacaaaattt

SEQ ID NO: 13533 - DNA, 113 bp, Glycine max
  Clone ID: 701067286H1
atcgagataactagaaacagtgtgatgaaaatgaaggtccttgttttcttcgttgctacaattttggtagcatggcaatgccatgcgtaccgatatcttccctctccgaatga

SEQ ID NO: 13534 - DNA, 268 bp, Glycine max
  Clone ID: 701067287H1
gtacagtttcggaggagacaaaaatagtcgttcgagatggcccgtacgaagcaaactgctcgtaagttccacaggaggaaaggctctcaggaagcagcttgcaaccaaggctgcacgtaagtctgcaccaactactggtggtgtgaagaagccacatcgttaccgtccaggtaccgttgctcttcgtgagattaggaaatatcagaagagtaccgagcttttgatcatgaagctccccttccagaggctggttcgtgaaattgctcag

SEQ ID NO: 13535 - DNA, 274 bp, Glycine max
  Clone ID: 701067288H1
aagtatctctcaagattctgtagcagcgagaagcagagtagcggatatgaagaagcaagcatcaaggcactttcctgatgatgggttatggtaatatcgcttcacgcacatctcatcattgcagctgtgtctaagtctaatggcacaatttccgtgtgcgatggctccgtagaggactgcctcaacgtcgtccacttggactcagagcttcttcccaccatctccagctcccacttccgcagaatccttgctggaaaatatgatggagttacca

SEQ ID NO: 13536 - DNA, 269 bp, Glycine max
  Clone ID: 701067289H1
tgaatgggttaacaagggcaatgcaccggcactgctcgagactcttaagaattacaacaagctggtgtctctcggtttcaggattatatccttgtcaggaagaacactggacaaacaggccgtaacagaagcaaacttaaagaaggctggctaccacacatgggaaaaattgattctcaaggatccacaagatccttccactccaaatgcagtttcatacaaaacagcagcgagagagaaactgataaggcagggatacaacattgttg

SEQ ID NO: 13537 - DNA, 234 bp, Glycine max
  Clone ID: 701067290H1
atgttatgatgatgaagaaggtgatgaggatgaggatgaggatgatgatgaggaggaggaggaggaagaaaatccggaaaagaaagggaagagcaggagtaagagtggtggcagggtcaaacctggtaaggatcagccgactgagcgccctcctgaatgcaagcagcagtagtgtttggctgtgtacaaacagacctggatatgtttagtttcagagaagtaattagtgtagag

SEQ ID NO: 13538 - DNA, 268 bp, Glycine max
  Clone ID: 701067291H1
gttgagttacgtacatagcttaaaaacatagtgcttgtttagactaatatcttccatggctccgaaagataggatcctgggttttgggacccacaggagccattggaagacacatagtttgggcaagtgtaaaggcagggaatcccacttttatattggttaggtacacccctgcctctgttaacaagccaaggcttgtcactgctgctaatcctgaaaccagggaagagctcattcagagcttccaaaattctggagttactctaat

SEQ ID NO: 13539 - DNA, 158 bp, Glycine max
  Clone ID: 701067292H1
tcttctgagagtgtttggttgaaagtagcaaagatgtatcctttcgggcaacagggtcaacagattaagggggatattgcaggtaatgcagaggaatgtagtaggatatcaccaacatcaccagtgttggagggatcgttgaccaaggcttaggcttc

SEQ ID NO: 13540 - DNA, 269 bp, Glycine max
  Clone ID: 701067293H1
aagaaccatatcatgggttcagaaaattgtatagataagaagcactttgtgctggtgcatgggcgatgcatggagcatgttgttgtaataagctcaagcaacgcttggaatctgctggccacaaggtcacagtgcttgacgttgcagcttctggagccaacatgaagaaaattgaagatgttgacactttttcacagtatactgagcctttgttgtttctattggacacaattccctcaaatgaaaaggtagttctagttggtcacagc

SEQ ID NO: 13541 - DNA, 264 bp, Glycine max
  Clone ID: 701067294H1
ctcaagaagcaaaaacctcgaagatttagggtttcgcattgctacttcgcgttcgttcatctctctctcacgcctcaaggttttccaggacaagtttccaacctggattccttcccattttgtacagccttggataggagtaaacctttgcagatatgggacaaagaaggctgtcattcgggtaaagccctacattgcactatgccactgagaatgatgaggggtggaatcaaatccagtttaacctggctgatttcaccagga

SEQ ID NO: 13542 - DNA, 91 bp, Glycine max
  Clone ID: 701067301H1
cgccgaacaggctggtgctgcggcagttttggtgaccgaacacattgaggagtctctgataaccatggattctcctgaggaaagctctgat

SEQ ID NO: 13543 - DNA, 229 bp, Glycine max
  Clone ID: 701067302H1
gttctaggtttcactcccattaacagcaaccatggtgcagaggctcacttatcgcaagcggcatagttatgctaccaaatccaaccagcaccgggttgttaagacccctggagggaagttggtgtaacagaccactaagaagagagcaagtgggactaagtggcctgtgaatggcaagaggatccaagggatttcacaattgagacctgctgaatacaagaggtctaga

SEQ ID NO: 13544 - DNA, 88 bp, Glycine max
  unsure at all n locations
  Clone ID: 701067304H1
gcttcgctataagctagtcttatcgtgcaggagaatatgaagttacngtgttcttctcctgttgctcgcagtcagttattgcgtagca

SEQ ID NO: 13545 - DNA, 86 bp, Glycine max
  Clone ID: 701067305H1
ctcggattcggctcatgtcaccttttttttgtgtacacgaagtcacctatttatgtgcattataattatggctctgttcttgaaaa

SEQ ID NO: 13546 - DNA, 94 bp, Glycine max
  unsure at all n locations
  Clone ID: 701067306H1
tcatggttcggttcagcancaacgtgatcggactcctgaacgctcatgtccttcatcctctccatcccgatcctgagtggcgaagtgtggctga

SEQ ID NO: 13547 - DNA, 280 bp, Glycine max
  Clone ID: 701067307H1
caacaatataaagaagggcgtggttttgttgtgagtactgagctgagaagagggagaagatgatcatccccgttcgttgttttacctgtggaaaggtaattggaaacaaatgggatacctatttggaccctctccaagcaaattacaagtgagggaattgcatggattccatgggacttggtccgtattggtgtaagcgcatgcctatgacccacgttgatctcactgagaagttgctcacatacaatacattggacaagtccgatctccattaagaaga

SEQ ID NO: 13548 - DNA, 274 bp, Glycine max
  Clone ID: 701067309H1
tcggtgctctggatcacatatcggaactctttgactgctccagtggcagttccaagcacaagaagcgcaagcacattgcagacggtggaggtgaaagtgaagatggactgcgcaggatccgagacgaaagtcaggtcaggcgtggaagggatggaaaggctgaaacaaggtgaattagaacctaaggccaacaaagtcactgttgtccgctaagttgaagcctcttaggtggtcgcccggatcgctcaacgtaacgggaagtaaacagaactct

SEQ ID NO: 13549 - DNA, 272 bp, Glycine max
  Clone ID: 701067310H1
aaagagctgactttggcattcctccttctcaccgcttctgtcaggagtctgttatctgcacaaggagttcacttctactttctacttttccaaggggtgaccttcctccttgtggggcttgatttgattggagagcagatgagctagttttcattcaaaaaatcataacagatgatgaataggaaacaacacctactgatttatcagccaagttgcattccaggaagaaaatggaccatggagcctagttaaaacccttccttccctccaaa

SEQ ID NO: 13550 - DNA, 283 bp, Glycine max
  Clone ID: 701067314H1
cggcttctgcttcaaggaaggagagcttgttattctctatcaacaagtaaaatgtcaggtgaagagggtgtcattgcagttgagccagctgctgctgctgctgccatcccaggcgagccaatggatatcatgactgccttacaacttgtgctcagaaaatctctgggctatgggtggttgtcccgtgggcttcattgagggtgcaaagttgattgagagcctgcttgcacactccgtggtcctggcagaggcctgtgaccagcttgactaggttaaactggtt

SEQ ID NO: 13551 - DNA, 277 bp, Glycine max
  Clone ID: 701067318H1
aagagaatggctcaagcaatggcatcaatggctggcttgcgtggttcctctcaggctgtgttggaaggtagccttcaggtgagtggctccacacgcttgaatgtggggagttgaagcagggtggcctcagtcacacgtgcagggttcacagttagagcaccaccaccacaagtgagttgtgaagtacaaagcagccgtacggcagtgctttcacttgttgctgctcgttttgccaatggctcttttgttcaagctgtgcttgctgatgccaaatcta

SEQ ID NO: 13552 - DNA, 238 bp, Glycine max
  Clone ID: 701067319H1
caaaaaccactaagatggcttcctttgtatccttcctagtgctgcttcttgcagcccttatcctcatgcctcaagggcttgctacttactaaaaaccaattaagaacgcaccagtgtacaaggctccattcgacaaggcaacagtgtacaaaccaacggtttataagccaaaaacaccgggttacgcggcggaaacaacgggttacaaaccaacattttaggaggcaccattccagga

SEQ ID NO: 13553 - DNA, 139 bp, Glycine max
  Clone ID: 701067320H1
ttccatttgttcctctcttccgctcgtaactgcgccgacaactcttgatcgtaatggcaccgccaccaggaccttattctggcaccagcaccctagctttggtcggtcgagctttcggtttttccttcgggcctgttta

SEQ ID NO: 13554 - DNA, 114 bp, Glycine max
  Clone ID: 701067321H1
gatgaggctgctggtaaactgagagctaaaggaatcgaagtattggcggttgtttgccacgtttcaaatgagcaacaaagggaaaatttgatagacacaactttacagaagtat

SEQ ID NO: 13555 - DNA, 263 bp, Glycine max
  Clone ID: 701067323H1
aaacacagagagagagagtgaacaaatccagcattgttcttttctctgcaacattttccactctcaaccatggcttcaaagcttttactcatcactgtcttcggttttgatttgattgcttctcgactggctgtgggtagttgacaggagaggaggaattgtaagaatgtggcggaccatggaaaggattataattaatggggctaaaactccggtattgcaactggctaaggtggtggagcatttttggtcctcctgggtaa

SEQ ID NO: 13556 - DNA, 92 bp, Glycine max
  Clone ID: 701067324H1
cacacacctttcaaattcaacaactatataatcgatcccactttagaagccttctcttctcttctggtgctcctattccaatagtctcttct

SEQ ID NO: 13557 - DNA, 241 bp, Glycine max
  Clone ID: 701067326H1
agagtttgttgtgagctataagctagtttatcgtgaggagaatatgaagttgtttgtcttctttgttgctgcagtagttttggtagcatggccatgccatggcgcaggctaccaaaggttccctctccgaatgaaaactggctatggtgagcgttcttcggaggtaaaatgcgcaagttttaggcttgctgtggaagcacacaacatccgagctcttttacaccattcctgaagagtgcgt

SEQ ID NO: 13558 - DNA, 226 bp, Glycine max
  Clone ID: 701067327H1
tgcttctagagaacccagaaagggcatccttgttgttttgggaggaggattttgaacttcttcagaactgtgtctgcatgctaagcaaaagtggcagaaggaagtgttcccgttctgctgcaaggtctcagtttattgtttaatagggtggaacagagtcattgtttgaactctctagcgtaagtgaactaatttcttaccattattattggatgatgccactttt

SEQ ID NO: 13559 - DNA, 253 bp, Glycine max
  Clone ID: 701067328H1
tgaaaataagagatgcgtcgagcggacgatgccgttttggagggcagcggggatgacatacatcacatactcaaacatatgcgcgaatctggtcaggaattgcctcaaggtaccctacaaggctgaagccatctctcgtgagaaggtccattttgctctctccaaatgggtcgacgccaagccctgaaaacctaataatcggttcaacaacccagaacaattgatccggattatttggaagctataatgctta

SEQ ID NO: 13560 - DNA, 77 bp, Glycine max
  Clone ID: 701067329H1
gttctaggtttcactcccattatcagcaatcatggtgcagaggctcacttatcgcaagcggcatagttatgctacca

SEQ ID NO: 13561 - DNA, 275 bp, Glycine max
  Clone ID: 701067331H1
cctcatcgtcatcgaactacccacgttctgctccttcgcagatcatttcgcgtttagcttccacgcaagatagcacataatgacgatggaggggataagacatctcgtgggaatgaatgggacgttgtatctctcacagcatcaacatatgcaactgctcctgtttctgatgaagttgagatgaaagatgattgggaagaagatgtaaatgggcaagatgaaggacgaacgtcacatgctttaatcaagtccagacactttgtccttccaaccaa

SEQ ID NO: 13562 - DNA, 274 bp, Glycine max
  Clone ID: 701067332H1
cttatgtctttgttaaagacctgatgaaagacgtctagagcagtgggagaaaactgttcaagcacaaagaggctggaattttggtaacttgcttggatttggtgacttaggtggacctccattgtctgccgctgaagaatattctgtgcactctagatatctttcaaaagcagaatccttaaatttgtctgaaattgcagagatgaaagttgtctatcgtggaggggtagacattgacggtcgtcctgtcatggttgttgtgggggctcatttt

SEQ ID NO: 13563 - DNA, 148 bp, Glycine max
  Clone ID: 701067334H1
gaaagacttatgtcggatatggaagtgtgaagatgagcatgataaaagcgaatctgaatcaattaaggaaactgggagaaacagtcttgacatgctgtcccggcatagagattccttgcccaaaaagacacaagtatctggacacaaa

SEQ ID NO: 13564 - DNA, 154 bp, Glycine max
  Clone ID: 701067339H1
caataggagacaggagaagagagttgatgttggtaggaaagaggagaggagagtggtggatcataggaaggtttcctggcttacaagtcacattcgtgttagggtgataacccgggattgaaaggggggccggtgtaattggaaaaaggggaag

SEQ ID NO: 13565 - DNA, 189 bp, Glycine max
  unsure at all n locations
  Clone ID: 701067340H1
ctcggaacagcaacgttgtagagggagacttttgggggagagtgagtgagagtacaaagatgtttctgcgtgcggtggcgcggacgttgatggcgaaggtgaaggcctcgacgggngatcgtggggctggacgtggtgccgaacgcgaaggaagtgctgatgggctgtacagcaagacgctgaaagaga

SEQ ID NO: 13566 - DNA, 155 bp, Glycine max
  Clone ID: 701067341H1
tgttgatccatctcttgtttcttgctttctttcttcaccatgtcacttgctgggaaaatcaccactgaaatcggggttcatgcaaccgctacaaagtggttcaacctcttcgcaacacaactccatcatgttcaaaacctaactgatagagtgca

SEQ ID NO: 13567 - DNA, 276 bp, Glycine max
  unsure at all n locations
  Clone ID: 701067342H1
tagcanaaagctgcgcaagatgagtggtagggtttctgggaaggtgaagtggttcaatgatcagaaggggtttggattcataagctctgacgatggcagccacgatctcttcgttcaccaatctcagatcaaatctgactctttccgaagcctcgccgaaggagagtccgttgagttcgccattgaatctgaatctgacggacgcgcgaaagctgttgatgttcatgggcccgaccgcgacagtgttcaaggaaccaggccacgccgttaatgttg

SEQ ID NO: 13568 - DNA, 205 bp, Glycine max
  Clone ID: 701067343H1
cctcgtgaagttaaggaagttggccatggtgggaaagaggtgactagggcggtgccagctgtatcagaaaaagtgaaggattctcttgtgaagaacattagaagatgaatgaacccccaacccttgaaaattaaggcagatattgaaatgaaatgaaatgttttcaatttgatgagattcctcaacataaaggaggcatgagtaa

SEQ ID NO: 13569 - DNA, 227 bp, Glycine max
  Clone ID: 701067344H1
tgcaataatcagcagaagcaagatttgaaaagagaaacggagaatttggtagtggcttctgaagtcatcaatcaagttccctattggtcttcatcagagttttcttctgtgcctatgccagtggtcaatgcttccttccaacactatggctagaaaaatcaaacatctcttgggagcatgattggtaacaaactagagggaattacattttccaacggtcatcatca

SEQ ID NO: 13570 - DNA, 162 bp, Glycine max
  Clone ID: 701067346H1
cgcgataagcttagcttcaccgtcagttgcaggaaaaatggtttcgctgaaactgcagaagcggctcgccgcgagcgtgctcaagtgtggcagaggaaaggtttggcttgacaccaatgaagtcaacgaaatctccatggccaattctcgccaaaacataag

SEQ ID NO: 13571 - DNA, 283 bp, Glycine max
  Clone ID: 701067347H1
atttacagtaacagtagtgatatttcggaaaaaatggcgatggctttcaagatggcgacgactggaatgtgggttacagatgagtgcaagaactcgttcatggatatgaaatggaagaaggagcacagatacattgttttcaagatcgacgaaggatcaaggctcgtcaccgttgataaactcggtgggcccaacggaggctatgatgatctcaacggcttcttggccaccgatgattgccgataagcggtttttgacttcgaattcggcaccggtgataact

SEQ ID NO: 13572 - DNA, 274 bp, Glycine max
  Clone ID: 701067348H1
cgattgagctgtcaacacttgggcatggatctcagtcaatgtcaatgggctgattaaattgtcttcctaaatatagaaaaataataaatgggctgatttacttcatggcccactgccggttgaataaagaaaaaggaaagaataaaggaaggaataaagaaggtggaattgttgatagtgatgattattggtagggtttaaataggaaatagagtattggtgttcatactcaagcccaagcaaatgtaataatttcatacttagcagatagtgt

SEQ ID NO: 13573 - DNA, 248 bp, Glycine max
  Clone ID: 701067349H1
gaatcattcaccaaaatctacacggcacctagcttgcagaagaagtggtacaacgttttgggaaatcatgactacaggggaaatggcaaggcacaaataaggcatgtccttagatacagagacaatagatgggtgtgctcagatcatataccctcaattcaggaaatgtagacttcctttttgtagacacaactccttttggtgataaatacttcattgagggtaaagggcataactacgattggaga

SEQ ID NO: 13574 - DNA, 266 bp, Glycine max
  Clone ID: 701067350H1
tccacacacaacattctctttagtcacagccaaacaccatttcattaattcttgcagaatattgcttagttttgtcttatctgaatttggaaacagcttttgaatggctttttcaagagttgcactgctaatatggacggtcggggattttgggattgcctctgccgggaatttccaccaagattttgatatcacatggggagattgtcgggctaagatactcaacaatggagagcttctcactctgtcacttgacaaagcctctg

SEQ ID NO: 13575 - DNA, 236 bp, Glycine max
  Clone ID: 701067351H1
tggctttaggtgttcctgctcttccgttgacatacgtggcccacgttctggcagttgttgccagcgtcttggtcgtggtctgggtcgtcaatttcaggggtggcttggcttgggaatgtgattacaagtccctcatcttcaacattcatccagttcctaatggtaatggcctactagttcatgggggtgaagctattattagttaccaagcttttcccctaaagaagggagtgaag

SEQ ID NO: 13576 - DNA, 115 bp, Glycine max
  Clone ID: 701067352H1
ctgtttttggcggttaaggatgtcggggaaaggagcgaaggggttgatcacaggcaaaacctccgccgccaacaaagacaaggacaagaagaaacccatctcgcgttcttctcgt

SEQ ID NO: 13577 - DNA, 278 bp, Glycine max
  Clone ID: 701067353H1
aggtgctctcgggttgtgtctgtgaccgtgactgcgtacctgtgactgtgtagcgcccgtggtgatctggggtagggggaaccctacagtgggacccctcccccaatattccttctgtccagcccctcacttccactggagcaggtccagagccattcctcaaccccgtgaacttctccaggcaaggctgagagggttcgaagtggctgggaaggtttccaagccccctggcccttccccaaaaaatgggtgaataggcggattaactgggccaacct

SEQ ID NO: 13578 - DNA, 242 bp, Glycine max
  Clone ID: 701067357H1
ctattttatactatacctacattttgataattttctttgtagttgatagccatggccacccgtggaaagcttgaggttgacatcgatctcaagtccaacgcagacaagtactggcaaacccttaggaattctactgaaatattccctaaggccttcccacatgattacaaaagcattgaggttcttgagggtgatggcaagtctcctggttctatccggcacataagttatggtgaagggtc

SEQ ID NO: 13579 - DNA, 268 bp, Glycine max
  Clone ID: 701067358H1
ggtttacagagaagctaagaggcgcagccgtagcaaaagctcgtggaattgctagcaatggcgaggatcaaggtttacgagctgaggcagaagacgaaggctgatctgctgaatcaactgaaggacctgaaggcggagcttgccttgcttcgtgttgctaaggtcaccggtggtgcccctaacaagctttccaagataaaggtggtgaagttgaacattgcccaggttttgacggtgaattctcagaagcagaaagctgcgttgaagg

SEQ ID NO: 13580 - DNA, 280 bp, Glycine max
  Clone ID: 701067359H1
ctcaaaacgacgggcatgttagaggattttctagctcgaatttagattggaggaggcttattgtgaaccagaatgtgaatgcagatgcaaatgctcatccagattctatgcaggatatagagaaaagaaactccgaaaagtggaataatatgagaccgaatatgaatccagatggaaatgctcctccaaattttgtggagaatagagggaacataaacttccagagcctggataattatgcgcaagatggaaatgttctccaaaatttaaggtggcccca

SEQ ID NO: 13581 - DNA, 278 bp, Glycine max
  Clone ID: 701067360H1
ccgtggtggtggtggatatggtggtcgtagtggcggtggcggtggcggtggtggatatcgtagccgtgacggtggttatggcggtggctatggtggtggtggtggtggtggttatggcggtggcagagaccgtggttactctcgtggtggtgatggtggtgatcgaagctggagaaactaaaggttgatgtcgtcaattaaggcgttagattatgccccggttttttaggtcgtgttggttcaaatccgagtttcttaatggtttcgggtaaccgcgg

SEQ ID NO: 13582 - DNA, 283 bp, Glycine max
  Clone ID: 701067362H1
tgattacattgggaagaaatatgctgtgctcttcttctacccgttggacttcacttttgtttgtcccacagaaatcactgctttcagtgaccggcatgcagagttcgaggcactaaatactgagatattgggtgtttcagttgacagtgtgttctcgcaccttgcatggactcaaacagataggaagtccagttggcttgggtgactgaattaatccttggattcctgaggtcaccaaatccaaatcgaattctaatggggtcctcattcctgatcagggaat

SEQ ID NO: 13583 - DNA, 281 bp, Glycine max
  Clone ID: 701067364H1
cttgtcaaggcacgcatctgatgagttctaccttgggcagagagatggtggtgactactggacttctgatgccggtccattagaggcatctaacatggatgtacagaagcttgaagagattgaaaagaagcttatagagaagaacaaagatgagacattgagaaaccgctatgggccagctaaaatgccttacactctgctctatccttctagtgacgacggattgactttcagaggaattcccaacagtatctctatctaaggaccctatggttgcttaa

SEQ ID NO: 13584 - DNA, 263 bp, Glycine max
  Clone ID: 701067368H1
gctagtgggtacctcccaacaaccccaagtggcaccccaccaaccaccccatcaaacccttctccttctactccctctgagtcaggatccaccaacaaccattcatcagcaaagcctagtggagctgtaaatggtttcaatggcaatgggcttttggtgggggctttccttgtgttagcaattaaggttgggttcaaggggtaaggaagaagcaatgctggtttttttttattccccttttaataatatggtaatggtttgcc

SEQ ID NO: 13585 - DNA, 303 bp, Glycine max
  unsure at all n locations
  Clone ID: 701067369H1
tggaatcggtcgagactctctgattttgtaatttagttcgatcaaatagctcccagtactttaattgatttctgaatatcatcacttaatttgacggaaagatggtgagcggagctgagatccggcaaggacaaagggcagaagggccagtcagcaaccttggcattggaactgcaaaaccaccaaactgtgttgatcagagcacctatcctggataatacttcagaatcaccaacagtgagganatgaacgagctcaaagagaaattccagcgcatgtgtgacaagtctatgatcaagagga

SEQ ID NO: 13586 - DNA, 244 bp, Glycine max
  Clone ID: 701067371H1
cactcgcaagcaaaaagaaagaatcccacgcgaggagaaagatggaggggaaggagcaggatgtgtcgttgggagcgaacaagttccccgagagacagccgattgggacggcggcgcagagccaagacgacggcaaggaataacaagagccggcggcggcgccgctggttgacccgacggagtttacgtcatggtcgttttacagagcaaggataacagagtttgttggcaactttccggttct

SEQ ID NO: 13587 - DNA, 243 bp, Glycine max
  Clone ID: 701067372H1
tgaaaatgaattgttatatggtgagtcattccctgtttcggccgaagttcttgattccagtttttgccttcccataggaaaagcaaagattgagagggaaggaaaagatgtgactattacagcctattcaaaaatggttggctatgctctcaaggctgctgagacactggccaagggaggaatcagtgctgaaggcattaatttgcggtcaattcgggcggctgattggtccaccatccatgg

SEQ ID NO: 13588 - DNA, 248 bp, Glycine max
  Clone ID: 701067374H1
cctaatctgaaggctcccgccatctgcgatcggatttcatggctccaaagaaggacaaggctcgcccaccttcatccaagcctgccaagtctggcggtggcaagcagaagaagaagaagtggagcaagggtaagcaaaaggaaaaggtgaataacatggtgctcttcgatcaaggtacctatgacaagctcctctctgaggcaacccaatacaagctcattactccctccaatctctctgaccggttg

SEQ ID NO: 13589 - DNA, 187 bp, Glycine max
  Clone ID: 701067375H1
gatggctatccgaatcaactccttgactctctcttccgctttacctaagatggactcaagaggtggaatttcgggcctctgggctggctcgcagatgatgccccaaatgcgaaaggaggctcgtggacgacgagtttggaggcgaagaaaattgataaaaaaggatgaatatatgcaacccaaaatg

SEQ ID NO: 13590 - DNA, 269 bp, Glycine max
  Clone ID: 701067377H1
atacaagttcacagatgaagatgatccacgttcttttcctctttgctcttgtcatcttcacttcccatgcttctgtcgatgatttctgtgtagcagtcctaaaaggtccagatagcccttcaagctatcagtgcaagccacctaacacagtcacagtggatgactttgtggtctctggccttgtagctggacaacccacaaacactttccatggcggaattaacttcggcattggtaatggtttttcaaggggtaattggtcttgggga

SEQ ID NO: 13591 - DNA, 261 bp, Glycine max
  Clone ID: 701067382H1
ctggtctttcccttctcactctcttctcttcacaataataatccaatctgtgttgttcagcgcagcacgccaaatcaaagcgcgtgagcaaagcagaaatcgcggcgggtacggcgatttctcagctaagctgtttttccggcgtccaacggagctcaaacctccggcgccggtcgtttctgtttccttcccctcggttcaagttatcgggtgttatgaatcttgagaagcatgacacggataatgctgggtctgatacca

SEQ ID NO: 13592 - DNA, 256 bp, Glycine max
  Clone ID: 701067384H1
atcgagataactagaaacagtgtgatgaaaatgaaggtccttgtcttcttcgttgctacaattttggtagcatggcaatgccatgcgtacgatatgttccctctccggatgaaaactgggtatggtggccggaatccggaagtggaatgcggaagttggaagcctgccgtggaagcacacaacatctttggctttgagaccattcctgaagagtgcgttgaagcaaccaagggattcattcattgcggaccatatt

SEQ ID NO: 13593 - DNA, 150 bp, Glycine max
  Clone ID: 701067386H1
caattttctagggtcttattcattttccggtggcttctgcagatgttgagtaccgttgctttgtcggtgggctcgcttgggacactgacgaccatgccctcgagagagccatctctcagtaaggaggaatcgttgaaacgcagattatca

SEQ ID NO: 13594 - DNA, 57 bp, Glycine max
  Clone ID: 701067388H1
cgaagatttaacaattagggtcgcttctccttcgccgacccatggctcccagagctg

SEQ ID NO: 13595 - DNA, 281 bp, Glycine max
  Clone ID: 701067391H1
gagataactagaaacagtgtgatgaaaatgaaggtccttgttttcttcgttgctacaattttcgtagcatggcaatgccatgcgtacgatatgttccctctccgaatgaacactggctatggtgcccgtactccggaggtgaaatgcgcaagttggaggcttgctgtggaagcacacaacatctttggctttgagaccattcctgaagagtgcggtgaagcaacaaagggattcatccatggcggacaattttggtccggattccaaaccggtaacccacc

SEQ ID NO: 13596 - DNA, 219 bp, Glycine max
  Clone ID: 701067392H1
cctgaccggagaattccctggtgactacggatgggacactgctggattatcagctgacccggaaaccttcgccaggaaccgggagctggaggtgattcacagcagatgggcaatgcttggtgcccttggctgcaccttcccagagatccttgagaagaatggtgtcaaattcggcgaagccgtgtggttcaaggccggtgcacagatcttctcagaagg

SEQ ID NO: 13597 - DNA, 87 bp, Glycine max
  Clone ID: 701067393H1
tgacaaagtcgcatagtcgacgttttcgttttagagagagacagaatcagagtttctgcttctgctttaggaggagagagagcgaga

SEQ ID NO: 13598 - DNA, 275 bp, Glycine max
  Clone ID: 701067394H1
cagttttataggttttggtggctgaaaccctgttcgggaattcagtggctatggctgcaaatgaagatgctgtacaggaatttacaccaaagaagaagccaccttcagaggatgagaagaggaagaagaaaattgtgcctgggagtttaatgaaagctttgatgaagcctggtgggggtgatgctggaccttctgatggtgacaagattacctatcactgcacaatccggactttggatggagtacttgtggaatctaccagaccagattatgga

SEQ ID NO: 13599 - DNA, 272 bp, Glycine max
  Clone ID: 701067395H1
agttcaaaggtaaggtaggttaacactcttcttcatcgtcgtcgcaatgggacgtgtgatccgtgcgcacgtaagggagcaggctcggtcttcaagtcccacacgcaccaccgcagcggacctgcacgcttccggagactggacttcggggagagccacggctacctcaagggagtgggtcacgacgtcatccatgaccctggccccggcgcgacggtcgccaaggtcgccttacggcaccctttcagatccatgcagcagaacgagctctt

SEQ ID NO: 13600 - DNA, 297 bp, Glycine max
  Clone ID: 701067396H1
cacgaattatgctcgagcttgtcaacgcacgcatctgatgagttctaccttgggcagagagatggtggtgactactggacttctgatgccggtccattagaggcatttaagaggtttggaaagaagcttgaagagattgaaaagaagcttatagagaagaacaaagatgagacattgagaaaccgctatgggccagctaaaatgccttacactctgctctatccttctagtgaggagggattgactttcagaggaattcccaacagtatctctatctaaggaccctatggttgctta

SEQ ID NO: 13601 - DNA, 294 bp, Glycine max
  Clone ID: 701067402H1
tctgccgttcacaagggcatgcaccacaaattctaccatggccgcaccggacgcgtctggaatgtcaacaaacgtgcatgttggagtcgaactcaaaaggcaggttggcaacagcattataaggaagaggattcatgtgcgggtagagcatgttatgccttcaaggtgcactgaggagttccgcctcaggaagattaagaatgatcagctaaaggtcgaagccaaggtcaagggtgagaagatcagcaccaagagacagcctcagggtcccaaacccggtttcatggtggaggg

SEQ ID NO: 13602 - DNA, 285 bp, Glycine max
  Clone ID: 701067404H1
ctttcttgttcctgatcagagaagatttaactggaacagtactctttatcggacaggtgttgaatcctcaggctgaataatattaacttgggtagcaaaacttatgctcctattctgttgtcttgatttacctatggttggatgatccaaaatttctggcagtttcacatgtggcttaagaaggtaaaaaggtacatatggatcaccgttttaagttttgaacacttacgagtatggcgttgtctaactaatttcgtcttccaagggtgatatgcgaatagccaa

SEQ ID NO: 13603 - DNA, 264 bp, Glycine max
  Clone ID: 701067410H1
tccagccccatcatggcttcagagaagcaagcggctcttgccgtcactccctctgatgctgatgctcctaccatatttgacaagatcatcaataaggagattctttctactgtggttaatgaggatgacaaggtgcttgccttcagggacataactcctcaagttcctacacatattcttatcattcctaaattcaaagacgggttaagtggtctatccaaggctgaggagaggactttgagattttggccgcctctgtaactg

SEQ ID NO: 13604 - DNA, 269 bp, Glycine max
  Clone ID: 701067411H1
tgagagagagcagaggaaaaggggaagaaaaatgttgagtgcgacggcgatcggcgcgttattcggtttgggaacccagatgtactccaatgctctccggaaactcccctacatgcgccatccgtgggagcacgtggtcggaatggggttgggcgcggtgtttgtgaaccagcttctgaaatgggaggccaagtggagcaagacctcgacaagatgctcgaaaaggccaaggccgccaacgaaagacgttatatagatggagatgatga

SEQ ID NO: 13605 - DNA, 240 bp, Glycine max
  Clone ID: 701067412H1
gtttgttgtgagctataagctagtttatcgtgaggagaatatgaagttgtttgtcttctttgttgctgcagtagttttcgtagcatggccatgccatggcgcaggctaccaaaggttccttctccgaatgaaaactggctatggtgagcggtcttcggaggtaaaatgcgcaagttttaggcttgctgtggaagcacacaacatccgggcctttaaaacaattcctgcagaatgcgttga

SEQ ID NO: 13606 - DNA, 275 bp, Glycine max
  Clone ID: 701067413H1
ctttcttgttcctgatcagagaagatttaactggaacagtactctatatcggacaggtgtataatcctcaggctgaataatattcaaattggtagcaaacttatgctcctattctgttgtcttgatttacctatggttggatgatccaaaatttctggcagtaacacatgtggcttaagaaggtaaaaaggtacatatggatcaccgttttaagttttgaacacttacgagtatggcgttgtctaactaatttcgtcttccaagggtgatatgcg

SEQ ID NO: 13607 - DNA, 278 bp, Glycine max
  Clone ID: 701067415H1
ccaagatgaagatgattcactttcttttcctctttgctcttgtctcgttcacttcccatgcttctgtcaatgatttctgtgtagcagaccctaaaggtccagatagcccttcaggctatcagtgcaagccacctaacacagtcacagtggatgactttgtgttctctggatttgtagctggaaacaccacaaacactttcaatgctgcattaacctccgcatttgttactgattttccaggtgtgaatggtcttggtgtatctgcggcacggttagac

SEQ ID NO: 13608 - DNA, 268 bp, Glycine max
  Clone ID: 701067416H1
cgtcggtattcggctcgatattcattcttagttcccctttctcttgtcaactagccctgtctgcagttacatcagaagataattgacctttgtttttgcttttgcatgatcttgattggaattattgatacaactgcagtgatattacatgataaaatttgtatctccaaggattttttggggggaatgtccacctttgaaatactaattcctgctgtaggatggtatggcttggaaggaacaataataaatctggaagaatgttagt

SEQ ID NO: 13609 - DNA, 287 bp, Glycine max
  Clone ID: 701067419H1
tattgacagttccatttgctacgcttgtagatatcaatggtatggtatctgtcaaaaggtaccccataggcaacgtttcagacacggttaaccatcccaaaggaagataccgtgaattttatcaatgtgactttgatattgacggtattcatggtctatctgaaattatgggtccagactttgaggttgttaggattttgactgaactacttgatgagctggacattggggaatatgagataaagttgaatcatagaaagttactggatggcatgatgcaaatatgt

SEQ ID NO: 13610 - DNA, 285 bp, Glycine max
  Clone ID: 701067420H1
cctctcttctcatttcctaggaatcgcctaagccaccgcagcatcggttcctccacccaccgcgatggcgcacgtgccggcgagcgaacgacgggggttctggacggacgagaagcacgtgcacttcctaaactccatggaagcctccttcgtccgcacaatgctccaaaacgaaggcaactcaaactcctccaccacgcgctactctctgcgcctcgaccgttatctccccgacacatccgaatccaccttggatttgaaaccaaactctcgctgccaccgcac

SEQ ID NO: 13611 - DNA, 280 bp, Glycine max
  Clone ID: 701067421H1
cttctttttctctaagtctaaggggtgccctgagatcactttgagcaatggtgaaggctgtggcagttcttggcagcagcgagggtgtcaatgggataatttccttcattcaggagggaaatggtccaaccaccgtaactggatctcttgctggtcttaagcctggtctccatggcttccatgtccatgccttgggggacactaccaatggttgcctgtcaactggagcgcatttcaatcctaataacaacgagcacggtgcccctgaggacgagaatcg

SEQ ID NO: 13612 - DNA, 275 bp, Glycine max
  Clone ID: 701067422H1
cattgcatgggcctttggtggcatgatcttcatccttgtctactgcactgctgggatttcaggaggtcacattaacccagcagtgacatttgggctgtttttggctcgaaaggtgtctttgatccgagccatcatgtacatggtggctcagtgcttgggtgctatctgtggagttggtttagttaaggctttccaaaagtcttacttcaacaagtatggtggtggggctaattccctcgctgatgggtacagcacagtactggattgggtgctga

SEQ ID NO: 13613 - DNA, 274 bp, Glycine max
  Clone ID: 701067424H1
cggctcgagaaggcattcaaaacaaggaaatggagtcactatctcctatgtcaatctacgatggcataaagagctacctgagaaagcggcgataccggcgtctcaagggaggaacaccgtcgttagaaggaagatggcgatcatccggttgagaggcccacgtaggaattggaggatcagagccaattcaaaggcttagatgggtgatgagatcaccattgaagatgttgacaaagctcaagaatgcttatatgaactttatgttgagactgtc

SEQ ID NO: 13614 - DNA, 276 bp, Glycine max
  Clone ID: 701067425H1
cgatcaccaaccaacgtggcttcttctcctcaggtaaatggaaaattggtgaagcgggttattttgtataaattggagggaatgctttaattttgtctctcaagttcagcttcttgctgtacaagtactagactattattagacttgccagaaatcaccaactgggttgctctttctaaccaggttctctaagtcaactttcagtttttgattgttgaggatggtgctggttttcgccctgggggatttgcacataccccacagggctcctgatct

SEQ ID NO: 13615 - DNA, 203 bp, Glycine max
  Clone ID: 701067426H1
tggagttaaaaactgttgaaatccatgcgcaatatcttttcattttttgtaatgctctcttgtgatgttcgtgaatggtagtcacattgttttctacaagaggcttgttggtctctttaaggattgattattgcttgcatatgtttgagcctttgaggcaattggtaaatagtctgatggctacagcgatattcattggattg

SEQ ID NO: 13616 - DNA, 275 bp, Glycine max
  Clone ID: 701067431H1
aggatctttcaatattctctgattgtagtcaaatcacaaacaacccaccaattataagttgccgtttcccatctcacaagctcgcggaattggaggaaccatcgttcgtgtcatgcggcattgaaccctgacacatgactcagaagcaaagagacagagtccaagattccatggaaacccagtacgaggagagtgagaaagacgagtcttcttctgtttatagttcctcagaagatgaagaggaggaagagatagagaaggagctggctgatgta

SEQ ID NO: 13617 - DNA, 288 bp, Glycine max
  Clone ID: 701067434H1
aattcttcttcgtctggagctgcgatcctctgcttcgatggccaccgtgcaactccaatccctaacccttgtttcgttctccggaattcccttccgcaaccttctcccctccgatcgccctctccggccgccggaactccgccgcgctgccgcgctacgcctgcctccgactccgacccgccgccgagacctgttttccgactcgcgccgccttgagaaccgctcctcgcggcggaggcgtcaagtgcgaggcaggagacaccgccgttgaagtggctcctattactg

SEQ ID NO: 13618 - DNA, 201 bp, Glycine max
  unsure at all n locations
  Clone ID: 701067438H1
cgggagcttccatcaatctttctctttgttacatgccattcattcacaatttcaggatggctgatcacggcatagtttcataaactttggtcttatatcttattatcaatgcaatcatcatgtctatggcaacatcacagccanacttcataaaacattactgttttgaccaaaatggtaactacactgctaatagtacgt

SEQ ID NO: 13619 - DNA, 276 bp, Glycine max
  unsure at all n locations
  Clone ID: 701067440H1
ctgctaagcaagctgtcaaaacaactcctgagctgacaaggtctcatagtaaagctgctagcatgttttctgggacccaagaaaagtgtgctacatgtggcaaaactgcttatcctttggaggaggtaacagtggaagggcaggcctatcacaaatcttgtttcaaatgttcactggaaggtgtcgcatnactccatccaactatgcagtcctggagggcgttttgtattgcaagcaccatttttcccagctttttaagggagaagggagctataa

SEQ ID NO: 13620 - DNA, 264 bp, Glycine max
  Clone ID: 701067441H1
ggaactttgttactctcacacatgtctcgctccgtgcctttggtttcaaccatttttctcttgcttctgcttctggtggccactgagatgatgggggcaacaatggtggcagaagcaagaacttgtgagtctcagagcaaccgtttcaaggggccatgtttgagtgacaccaaatgtggctctgtttgccgaaccgaacgtttcactggaggacactgcgtggcttccgtcggagatgcttctgcaccaaacattgttaatttt

SEQ ID NO: 13621 - DNA, 269 bp, Glycine max
  Clone ID: 701067442H1
ggcattgaaggctatcaaagaaggggggaaagttgtgacaatagcaccaccagcaactccacctgctatcccattctttctcacttcagatggtgctgtgttggaggaagttacaactcacttagaaagtgggaaggtgaagccagtattggatcctaagagtccctttccattttctcagattgtggaagcatattcatacttgaagacaaatagagccattgggaaagtagtcatacatcccatcccttgaacatatataactatgc

SEQ ID NO: 13622 - DNA, 180 bp, Glycine max
  Clone ID: 701067446H1
aaacgggtcatagtcgcattttcatttcattttgaattgaaaccgcggagagtttgctgctacatcgatcatcatcacctcatggacgcacacgatccagcagacccaaagcagagccctgctgacatgactgcctttgtgcaaaatcttcttcagcagatgcaaaatcggttccagaca

SEQ ID NO: 13623 - DNA, 273 bp, Glycine max
  Clone ID: 701067447H1
tgggatgccatcaagtcctgggtgcaagaatatgtctcattctactacaaatcagatgaggaactccaaaaagaccctgaactccaagcttggtggaaagaaattgtagaggtgggtcatggtgatttgaaagataggccatggtggaaaaagatgaaaactcgtgaagagttggttgaagcttccgctatcctcatatggattgattcagcccttcatgctgctgttaactttggacagtatccatatggaggtttaatcctaaacaggcca

SEQ ID NO: 13624 - DNA, 294 bp, Glycine max
  Clone ID: 701067449H1
acactagtaacaaagatccaacaagcagatcaatctctctctctgtctcccaatcacaaccagacatggcggttcgaacggaggatttttgaggcagtatgcttaagaaagcaaggactttgccaccgactcaatcaaacgaagacttgcttatcctttatggattgtacaagcaggccaccgttggacctgtcaacaccagccgtccgggaatgttcaacatgagggacagagctaaatgggatgcatggaaggctgttgaagggaaatccaaggacgaagcaatgagtgatt

SEQ ID NO: 13625 - DNA, 280 bp, Glycine max
  Clone ID: 701067453H1
gaagcagcagcaatagttgagcagcgcggaaatcgcatcgacgactgagacataaagatgggaagacaagccgtgaccaaattgctcgtctcggatcgcttcgcgcggccacggcctccgcctcttctccggcggcgtcgccggcggtcttcgtcgataagagcacgcgcgtgatctgccaaggcatcaccgggcaaaacggcaccttccacaccgagcaagccattgaatacggcaccaacatggttggtggtgtgactcataagaaaggtggcaccga

SEQ ID NO: 13626 - DNA, 263 bp, Glycine max
  Clone ID: 701067456H1
atcagtttttgcaacatccaacagcagaggtaccattgttgattctggaacaactttggcgtatacttgcggaagacgcttatgatccctttgtctctgggattacagcttcaattgcacattctgtacacattgttgtttccaggggaaatcagtgttatttaatcacttcaagtgtcactgaacgtttttcctcaagtcagtactgactatgcatggggggcatctatgatttcacggctcaggactacctgatacagcag

SEQ ID NO: 13627 - DNA, 275 bp, Glycine max
  Clone ID: 701067461H1
gaaagatggtgaaagtggcgacgtacttcgcgatgacgcttggagccatcgtgttctggcagtccatggacaaactccatgtctggatcgctcttcgtcaagacgaaaagaaagagaggttggagaaggaaccggagatcagaagggttagagaagaattattgcagcagcaggccagtcagaaggattctctttcttgaattccgattatgtcgtaattttgctttgtaatttccccttgcttctgtttttccaatgcaatgtcttgtgctcaa

SEQ ID NO: 13628 - DNA, 271 bp, Glycine max
  unsure at all n locations
  Clone ID: 701067463H1
ccttctttcgcctactcctccctctctctaactttcacacgcagcgaggtatcgtcttcttcttccgtttctctgcatcggtgtgaacaatggctacatacgctgcgatgaaagccacaaaggccggggttggaggagtcccaggacaggatccacaagataaggatcaccctttcctccaagcaaatcnnnaacctcgagaaggtttgtgcggatttggttcgcggtgcaacggataagagactcagggtgaagggacctgttaggatgc

SEQ ID NO: 13629 - DNA, 275 bp, Glycine max
  Clone ID: 701067464H1
agtgtttctcctttcatgcactttttgtcaacagagcaagaacatggggaaagcactttggtcctttttggttttcacatgccttttgattcctctagcagttgcagattggaacatactgaggctacagacacaggatggattgaggatcagtttgaagacctattgtgaaagctggaggatgaatgtggagctgcacaacattagggacttccaagttgtgcctgaagaatgcattgaatacattggaaaatatgtcaagtccacacagtaca

SEQ ID NO: 13630 - DNA, 285 bp, Glycine max
  Clone ID: 701067465H1
gttgtaaaaagtttgctgcgccctgatttccatgtttcggcacaaaactgttgggttcgcaaaggtggtgcttataccggtgaaggtaatggctgaaagccttgtaaatttgggaattccttgggttattattggtcactctgaacggaggcagcttttaaatgaatcaaacgagtttgtgggagataaagttgcccatgcacttcaacaaggtctaaaagttattgcatgcattggggagactctcgaacagcgtgaagctggtacaacaacggctgttgtttc

SEQ ID NO: 13631 - DNA, 283 bp, Glycine max
  Clone ID: 701067466H1
gaaagtcctaaagctattaaggagataaggaaatttgcccaaaaggccatggggaccaatgatgtgacggtggcagttgagtctgacaaagtttgtctggagcaagggaatcaggagtgttccaaggaggattagagtaagaattgctcgcaagagaaatgatgatgaagatgccaaggaagagctgtactctcttgttaccgttgttgagatccctaaggacgagctcaaagggttaggcactaaggttattgatgacgaggattgatttatatctgtttga

SEQ ID NO: 13632 - DNA, 79 bp, Glycine max
  Clone ID: 701067468H1
tcgttttgtatgtccaaaactgtatcataatggagtcgtcaagactcactgtggcaagcttgtttatcagaccacgaag

SEQ ID NO: 13633 - DNA, 267 bp, Glycine max
  Clone ID: 701067473H1
cttttgcttcactcgtcatcactacgcagatcgcagcaaaccagactaaactccgacgatgcctcccgtcgctcctctatccggtgatgccatattcgccaacgtcgaacgcgtcaaatgcggagtgtttactttgacgtatggcgcaattgtgcgtcaattgctcacggatctggaagaggctgaggaggttaacaagcagcttgatcaaatgggttacaatattggaatccgtttgattgatgagtttttagccaagtctaatgt

SEQ ID NO: 13634 - DNA, 269 bp, Glycine max
  unsure at all n locations
  Clone ID: 701067475H1
aacaaaacaaccccacttctatcttgtatttttcactacctagaaaccgatccaactgcggccaaactctcttcaggatggagcaacagaatttggncggaggtggatcggtttctaggtagtgtgatacgaggcagagatgttttgctgccattgtaatttggaaacaacactcagaacaaatcatgtccaatctgcaaacaaaacaaccccactttgacctcgtatttttcatgttgtgtatgattttgtccagtggatcaggtcgt

SEQ ID NO: 13635 - DNA, 264 bp, Glycine max
  Clone ID: 701067477H1
cgattttgcagattgttggaacatctaagaacttccagaagaggaagaagctctcaatggcaatgtcatcagattctgaggactcgtacagcagcaacagcgtccatggtcttaagaaaaactgaaaagtccagagcttcaaaccatccacaccacctccaacttcggttaattacagaacggccaagagaagaaagggaataccacaccgtgccccaatggtgggactaatcatagaatattagtgatagtgggtatttttag

SEQ ID NO: 13636 - DNA, 274 bp, Glycine max
  Clone ID: 701067480H1
ataagattcttccctctcccttctctctctctctctagaacttcgtcctccctctgcttctttctttcttagttgcagcgcgattgctgcatcgtcctccaataaagagctcgctgctagtggaaccctaacacggcggcaacgagaggtgttcggttgaagctcagatcagcgatggcagcagcaacccgcacttctctgcggttcctcctctcagtctccgtaaccctaactctcgctcacctcgccgcctcaaattccgaaggcgacgctc

SEQ ID NO: 13637 - DNA, 277 bp, Glycine max
  Clone ID: 701067484H1
agatatcgagccgattcggatcgagcaaacatgttggtttatcaggacctacttagaggtgatgagcatctctcggactccttccgttacaatgacattgagaaaaggatgtgtgggaagttaggggaagtgggatgttaagggagcagttgatgttgaaattggtgaaaacccttctgatgagggtggagaagatgagggagtcgatgacgcagctgttaaggttgttgacattgttgatacattaagacttcaggagcaacccgattttgataag

SEQ ID NO: 13638 - DNA, 69 bp, Glycine max
  Clone ID: 701067485H1
gtggtgataaagctcaatggaggcatggggacaactatgggttgtactggcccagaatctgtcattgaa

SEQ ID NO: 13639 - DNA, 259 bp, Glycine max
  Clone ID: 701067486H1
cctattgtgttggccttcgggatcggagtaatgattaacagtaacagccgaggatttagggtttgatgtgataaatagcgtgttattccctggaattcaaatttcccttatatcttagaatgttgcggaagtttccttgtaatttgtgtcttgataataagatttcacgtatgaagttttcatccttggatctttattctccaatgaaagtggcttttgtcaaggtttaactcagttttgatgctagaaaatggatagt

SEQ ID NO: 13640 - DNA, 270 bp, Glycine max
  Clone ID: 701067490H1
cggctcgaggatggttcaagaggctgagaagtacaagtctgaggatgaagagcacaagaagaaggttgaggccaaaaacgctttggaaaactatgcatacaacatgaggaacaccgtgaaggatgaaaagattggtgagaaacttgacccggctgacaagaagaagattgaggatgcaattgagcaagcaatccagtggttagacagcaaccagcttgcagaagcagatgagtttgaggacaaaatgaaggaattggacagcatctgcaa

SEQ ID NO: 13641 - DNA, 179 bp, Glycine max
  Clone ID: 701067491H1
aaagctcgatatcacttccccatctatattcaagtttcagaagacacgtgggtggatagcaacttagaacacaagtgcactcaaagtggaacaacccaagcttgtatcaaagctcaacaaaaatggcttctatctcatggataatccaccaccccatcactttcaagctcaataatgcc

SEQ ID NO: 13642 - DNA, 260 bp, Glycine max
  Clone ID: 701067492H1
agagggatgggagaaaaggagggttgctaggctgtgctttattttctctagagtggggctaaagttgtacaattcagtggaggagggatattatgctatctggtgttgttgcttttacgttcaagatgttatacaagggaattgctattctcccctccgttagaaaattgatgttcattgtgtgagttttttttttgctataaatttaaacgtcagtataaatatttattataaaatcagtatgaatgttttttctcccc

SEQ ID NO: 13643 - DNA, 314 bp, Glycine max
  Clone ID: 701067501H1
atttgcttcttcgagtttcacagccaagtcgtaaaagggtttcaagggatggaaaacatgcagagcttctggcaattgggtgatgaactccgtgggcactcaaaagcatcggaggatcacaagtggttaatggttgcctcgaaactggccgaacagacaagattgaagggggagcgtgtgaacaaccttgatctttcaaagggacccattgaaacaaggtcaagggataaatttgggttccaggaagagaacaaatttgattctcttaacttgagcatgttgaacctggactctaaatttctgagaatgtgagc

SEQ ID NO: 13644 - DNA, 143 bp, Glycine max
  Clone ID: 701067503H1
atagcaagctagctaggttgaaaatagtttggttttgtagtaagtgaggtgaggtgccaaaatggtgaagataactcttggtactttcgatgactcttttggtgttgcctctcttaaggcttatttggcagagttccatacaa

SEQ ID NO: 13645 - DNA, 308 bp, Glycine max
  Clone ID: 701067505H1
tcactccgagcctcaacagcagcaaagcaaattcgcagttggtaagagaaaatggccgacgatagcacagctacctgcatcgacatcctccttgccatcatccttccatctcttggtgtcttcctcaagtatggctgcaaggtagaattctggatctgtttggtgcttaccctttttggctacattcctggaattatctatgctgtctatgctatcaccaagtgatagatcatattcatcattttaattttgggtggacaatgaataatttgtcaaattaaaggacgacgctatgcatgttcctcatc

SEQ ID NO: 13646 - DNA, 301 bp, Glycine max
  Clone ID: 701067506H1
acgacgcagcagcggcctagggctttgacgtcgccgatcttgttgaaaaccaaaaggaggagcgagtccggtaaccggtcgaagtggtcgatttcggaggcatcgggctccgggaagatccggcacgctagatctgcgcgttgggaagacattctagagagagagagagagagagagaaattaattgacctggatcggatcgcaagggtttggaattgaggggtttttttcaggcagatctatgaaagggtgaagcataaacacggaaaaggagagaaagacaggagagagagagagaagt

SEQ ID NO: 13647 - DNA, 301 bp, Glycine max
  Clone ID: 701067507H1
atcactgcttgctttagcttacgttctgtatccattttcctctctctctctctctcaaactcgggtttgtgctgagagaaccaagggtttcttcccttgcagagaagaaaatttggttcagatcgaaagttatacatgcatggttttatatattgttctttcatctttctcagatatggttcgaaatgagagattggggttgatgggaatgttgtttggctcgaggtaactatgcatggtactaattttgttcatctttgaagctttaatttatgggtttcgactctttgatcccttgaaa

SEQ ID NO: 13648 - DNA, 302 bp, Glycine max
  Clone ID: 701067509H1
cgcaggctttcatcttccttcaacaagcctttacgtcctctcttcaatgctggctcagtttactacaagtcctctttgcctgctgaagctgcgtacgacaatgagaaaagctgtgatacggaattgaatgctccacttgaggttgttgatcctgagattgctgatataattgagcttgaaaaagctagacaatggaagggactggaactgataccctccgagaatttcacttctgtctctgtaatgcaagctattggctctatcattactaacactcggaatgaggatatcccggtgcaaga

SEQ ID NO: 13649 - DNA, 298 bp, Glycine max
  Clone ID: 701067510H1
cggtgtgggtgtttgaatctggtgaaggatgtcaattgttccaatcaaccagggtgatgccaaccgctccaaccccttcgcttcgtggggtcaattcgtggattttcctctccctccttccatctccggcttcttccccggcttggaattcggattcggattcggatcatccgtgaacacacgtgtggactggagggagactcccagagcgcacgtgtggaagctggtgcttcccggcttctccaacgaggacgtgctggttgagctccaagacgagaggtgctccaagtcagcgtgg

SEQ ID NO: 13650 - DNA, 280 bp, Glycine max
  Clone ID: 701067511H1
cgagagatagcagaggaacacgggaagaacaatgttgagtgcgacggcgatcggcgcgctattgggtttgggaacccagatgtagtccaatgctatccgcaaactcccctacatgcgccatccgtgggatcacgtggtcggaatggggttgggcgcggtgtttgtgtcccagcttctgaaatgggaggcccaagtggagcaagacctcgacaagatgctctcaaaggccaaggccgccaacgaaagacgttatatagatggagatgatgattaatgcatg

SEQ ID NO: 13651 - DNA, 120 bp, Glycine max
  Clone ID: 701067512H1
agtcgagtgtttccataactctttacagttacaccacgcctcctcctcctcctttagccattcccctatccacaacagcgattccaattagatctagggtttcctcttcctcactattca

SEQ ID NO: 13652 - DNA, 297 bp, Glycine max
  Clone ID: 701067513H1
gagcaacttccaacaccatagtgaaatggcttccaaggctgcacttctcttgtgtttcaatgttctcttcttcaccgtggttagctccacatatgtgccatgcaacccaccccccaaaactccaaaacacccacctgtcccaaagccaccttccccaaagcaagcaagttgccccaaagacactattaagtttggtgtgtgtgctgatgtgttaggtttgatcaatgtgcaacttgggaagccaccaaagaccccatgctgcaacctcattgagggtctgctgatcttgaagctgca

SEQ ID NO: 13653 - DNA, 193 bp, Glycine max
  Clone ID: 701067514H1
attgactttcagaggaattcccaacagtatctctatctaaggaccctatggttgcttaagtactgttcctggttttaaataaatgtgaaattgaaggaaccagattccttaatcagttgtgtatgcttaagtcatgtatttggagtggctgaatgtatttgtatttgtcattaataaagagagttgtgttagt

SEQ ID NO: 13654 - DNA, 298 bp, Glycine max
  Clone ID: 701067515H1
cgattatctcattgatcagggtctctaatctttgctttatgtcttgttatcgtgcatatttcattggcttctgtacaagtttttgcatcgacctggactggaatgctttgattgcagtgtaataatcttgttgtgagtatgaaaagtcacgggatctgcgtgtagtgaagaaagtgtttgatgcttgagaaatgatgactataatctctatctttgtacttttttagtggggtacctgtatacattacagtggttttaaaattttaatgctatgttataaggttggcatatttatcaa

SEQ ID NO: 13655 - DNA, 314 bp, Glycine max
  unsure at all n locations
  Clone ID: 701067517H1
ctgaaattttaattgacttttctcgcctcataaaaaaaacctaccaatggctcccgcaaaggcagagaagaagcccgcggagaagaagccggcagagaaggccccagcggagaagaagccgaaggnagaagaagatatcgaaggaaggaggaagcgagaagaagaagaagagaacaaagaagagcgttgagacctacaagatctacatcttcaaggtgttgaagcaagtgcaccccgacatcgggatctccagcaaggctatggggatcatgaacagtttcataaacgacatcttcggaagctcgcccaggagt

SEQ ID NO: 13656 - DNA, 316 bp, Glycine max
  unsure at all n locations
  Clone ID: 701067518H1
ctgaaattttaattgactttagtatgatcataaaaaaaatctagcaatggttcctgcaaaggtagagaagaagcttgcggagtagaagcaggaggaagaaggncccagcggagaagaagccgaagggggagaagaagatatcgaaggaaggaggaagcgagaagaagaagaagagaacaaagaagagcgttgagacctacaagatctacatcttcaaggtgttgaagcaagtgcaccccgacatcgggatctccagcaaggctatggggatcatgaacagtttcataaacgacatctcgagaagctcgcccaggag

SEQ ID NO: 13657 - DNA, 301 bp, Glycine max
  Clone ID: 701067521H1
tgaatatgctaatgtgtacaagaccagtcttgatgatgatgttattggggatacctcagggaactacagagattttttgatgactttgttaggtaaaggttcagagggagagtgatacattaaccaacaagcacctctcatggtattataggattgcttgtaatgtgcatttgatggtctagactctgtaatatatacgttgcttctttttatttcaaaagaatcagaattcaagattgaaaccaaaaccatttatttgttattctgcattgactgtgtagattattaattgtaactgatg

SEQ ID NO: 13658 - DNA, 301 bp, Glycine max
  Clone ID: 701067522H1
ctccagtgacttgttattggactctatcattgattattcgtggggaatcagaaatggtgttagttttcaagaacttacgccctccggtgaaaatgttggcctatgtctggaaggccctgtgtgctgcaactgatagtaaagaagagacctgtactcatgcagaatgaataattgacagttatggcttatgtactggtgtctggtgtacccccatcattgaacgccaatcctgtgtgagagaaggattggattcaacatacatttggaaagtgaaatttttgcaaaccacactcttctcgag

SEQ ID NO: 13659 - DNA, 298 bp, Glycine max
  Clone ID: 701067523H1
ggtgtgtatactaaagactataagatagaagattggggttagggtttgatcggacgcaatggctggcaccggcatccacccataccaccagcaatgggctcccgcggctgccgctcctcctcctcctccggcagccgcgggcggtcctcctcctcaccctggggaggaggttcgaacgatattcataactggtcttccggaagacgtgaaagagagagagctgcagaatctgctgagatggctgcccggtttcgaagcatctcaactgaatttcaaagctgagagccaatgggttttg

SEQ ID NO: 13660 - DNA, 299 bp, Glycine max
  Clone ID: 701067524H1
aagcttgctactgagtttccacactgcataccttatgtcttccgaattcgaagttaatttgcaagatggctaaggaaaaggctcagatcaacattgtggtggttggtcatgtggaccctgaggaggcaaccaccattaacgagctgaagaagcctgttgtggagaaagaagctccagggcatgccatatgagggcatgcacgtacggcctcggaggggaaccagaaaattatgttaacaaaataatctggaaccctaatgtatcagtgtcatcatcagtgttagtttaagctagctttg

SEQ ID NO: 13661 - DNA, 298 bp, Glycine max
  Clone ID: 701067525H1
ggccggatgaactcatgcatagagttttgttaaataatattttcctgcaactgatgactagttcggtcataatttacgtacaagtagaatagcccacagttgtttatggaaaatcgaaattaaaacctccaattttattgtattttcacgttgggttctcgtactcataaaatgtttgtttttacatatcgtaggcaatgaatgcatgtatttgacaattgacgggatcattttacaacactataagttggcctgtatgtcgttaagttgttgctgttattacatattcatgtaatga

SEQ ID NO: 13662 - DNA, 271 bp, Glycine max
  Clone ID: 701067529H1
caaagtgcagaggctccgcaaggagtgccccaacgccgagtgtggtgccgggactttcatggccaatcacttcgaccgccactattgcggcaagtgtggcttgacctatgtctaccagaaggccgatgcttaaattcgttggaagtgaattctctgtggttctattttaattttagttatttaaaagttttggttaatgtttttgttcaattagtgttatgactgtttgggctttgattaaacctttatgaatactgtttcgctttggatt

SEQ ID NO: 13663 - DNA, 297 bp, Glycine max
  Clone ID: 701067531H1
cagcttgctactgagtttccacactgcataccttacgtcttccgaattcgaagttaatttgcaagatggctaaggaaaaggctcagatcaacattgtggtggttggtcatgtggaccctgaggaggcaaccaccattaacgagctgaagaagcctgttgtggagaaagaagctccagggcatgccatatgagggcatgcacgtacggcctcggaggggaaccagaaaattatgttaacaaaataatctggaaccctaatgtatcagtgtcatcatcagtgttagtttaagctagctt

SEQ ID NO: 13664 - DNA, 296 bp, Glycine max
  Clone ID: 701067532H1
ctctaacgaaagagcgagaaagcgaagacagccatggcgtcgtttctagcatcgtttctggatccgaagaagaactggttcgccgctcagcacatgaaatccctctccaaacgcctccgcaaatatgggctccgatacgacgatttgtacgatccttactacgatctggatgtgaaggaggcgctgaatcggcttccgaaagacgtggtggacgctcgccacgcgcgtcttaaacgcgccatcgatctttccatgaagcacgagtacctccctgacaatctgcatcaatgcaaaca

SEQ ID NO: 13665 - DNA, 54 bp, Glycine max
  Clone ID: 701067533H1
tattgttttcttccattaaggaagcaatatgagaagtgcaggaagcaattccgg

SEQ ID NO: 13666 - DNA, 58 bp, Glycine max
  Clone ID: 701067534H1
attgttttcttccattaaggaagcaatatgagaagtgcaggaagcaattccggaaaaa

SEQ ID NO: 13667 - DNA, 78 bp, Glycine max
  Clone ID: 701067535H1
atttgctaacaaacaagatcttcccaatgcaatgaatgctgctgaaattaccgacaagctgggtctccactctctcag

SEQ ID NO: 13668 - DNA, 301 bp, Glycine max
  Clone ID: 701067536H1
gcagaggagcctaaagaaactactgaaacagaatcagcagcagcagcaccaccagcaaccacagaggaagagaacaaaccagctgagtcagttgaaaccccagtagaggttcctgttgagaagactgaagcttagacctatggacagtgtgagtgagaaaaacaagtttaaaaatggtcctagttgtggggatcaggtctaccattttgcatgccatgttgaaaagcctcttttttttttttctcttaattcctttagtttactttattaatattattatatgatgctaagtctttggttg

SEQ ID NO: 13669 - DNA, 297 bp, Glycine max
  Clone ID: 701067539H1
cgaattagttatcttgagaaacattattcccattgctatatattatgtctagcatgaaggttacatgggtggttgtgcatcatgtgcatggccgtggtgggtgcaccgatgatggcgcaagcatagacatgcaatgatgtgacggtgaacatggcacagtgcctatcctacctgatgcagggaggaacaccttcaacactttgctgcagcggagtcaagaacattcttggctctgctgtcaccaccgttgacaaacaaactgtgtgcaactgtctcaaggcgtgctgctaggtacaa

SEQ ID NO: 13670 - DNA, 282 bp, Glycine max
  Clone ID: 701067540H1
cagtcaaactttcatctttctcattcacttaacccaagcgtaaaaatggcagcattgaatatgtccactgtgagacttccaagagcttccttgtctggaacgacaccagctaggagatcttgtgctctcatcaagaatccatcatctttgaggtctgtgaagaacgtgtctaaagtatttggattgaaatcatcttcctttagagtgtcagcgatggcggtatataaagtgaagctgattggaccagaccgtgaagagaatgaatttgaagcccctgatgca

SEQ ID NO: 13671 - DNA, 295 bp, Glycine max
  Clone ID: 701067541H1
atggaaccaaagcctaaagactcgccttcagaaaaaaaagtgaaaactccaaacatttttgagcgagctaaggaggagattgaggcagtgtttcatcgcgacaaatcgccacaccatcacaaagaaactcatgggacaagtgatgacattgatgagggaacttcacctgatgaaatcaaagcgcctggtgtgtttgaacgggtgaaggaggagattgaagctgttgctgaggccattcatcccaagaaagaatctgaatctggcactcgtgatgtgtcgcaccaaagtgatgtct

SEQ ID NO: 13672 - DNA, 253 bp, Glycine max
  Clone ID: 701067543H1
tgattccatggtgtcaaaaccataatttttcttcccctcggctcagaaatttccctattagagatttatttgttagaaaagaaacaccatttacttgatattgaatctcggtaaaattttgtttgttgacatatattaaatcactgcaattaaacgattaagtttgcttcaatatatgtcaacaaacaaaatcgtttaattgcagtgatttaattgtttcaaaaaaaaaaaaaaaaaaaaaaggggggccccc

SEQ ID NO: 13673 - DNA, 296 bp, Glycine max
  Clone ID: 701067547H1
cgcaaagacgaagtgtctgcttcttccgattccggcacgcccccatcaccatggtgaacgttccgaaaacaaagaacacctactgcaagagtaaggcgtgcaggaagcacaccctgcacaaggttacccaatacaagaagggtaaagatagcattgctgcccaaggaaaacgccgttacgatcgcaaacaatctggttatggcggacaaactaagcccgtcttccacaagaaggctaagaccaccaagaagattgttctgaggttgcaatgccagggttgaagcatgtctaccaac

SEQ ID NO: 13674 - DNA, 304 bp, Glycine max
  Clone ID: 701067550H1
cgcaacttcatggatttggaccagctgccaatcgtttattggaggcctataaaatgcttttgaagtttttgggcaacctacggaatcttacggactcacatgcagcacttgccttcggttcttctgagacatccgacgggccttcatctgtcacacgaataatctctgaatgtgaatctgcattgacagtcttaaatcgtgatcttggaattctctctgcttccattgctcgtgaacaggtagagaagatgaacatttgacgaaacatgagaaacaagttattaatcctattcttttggatttt

SEQ ID NO: 13675 - DNA, 279 bp, Glycine max
  Clone ID: 701067553H1
gaagcagcagaaatagttgagcagcgcgcaaatcgcatcgacgactccgacatcaagataggaagacaagccgtgacaaaattgctgtcctcgatagcatctcgacgacactccctccgaatcttctcggtcgagtcgcggaggtcttcatcgatcacagaacgcgacgtgatatgccaaggcatcaccggcaaaaacggcacctatccacaccgagcaagacattgaatacggcaccaacatggttggtggtgtgactcatcagaaaggtggcacaga

SEQ ID NO: 13676 - DNA, 297 bp, Glycine max
  Clone ID: 701067554H1
gacctcggcacaaactaacagagcattagcatttctccttcgtatcactgccgcgacccttctggttctggattccgacggtgccattgacaaccaccacctttactggtaagatgggagagctggccactgagaaacatgttcgatatatattatcagttgaaaagaggaaagataactttgaatctgtagtaatggagcatctgagaatgaatggggcatactggggattgaccactctggatcttctaggaaagcttcattctgtcgatgttgatgagttgtttcatggttgat

SEQ ID NO: 13677 - DNA, 288 bp, Glycine max
  unsure at all n locations
  Clone ID: 701067555H1
tgagacaaacagatagtgtgggagagagaagagcggaagagaaaatgacgaccaggttcaagaagaacaggaagaagagaggtcacgtcagcgccggacacggccgtatcggaaagcaccgcaagcatcccggaggtcgcggtaacgccggtggcatgcatcaccaccgtatcctcttcgacaagtaccatcctggtttcttcgggaaggtaggcatgcgctacttccacaaacttcgcaacacantctacaatccgatcatcaacatcgacaagctgtggtcctcct

SEQ ID NO: 13678 - DNA, 292 bp, Glycine max
  unsure at all n locations
  Clone ID: 701067556H1
cagcctcaccaancctaacgcgtgcagagcagagagagacgcagccatggggcgaatacccgcgaggtgttataggcacattaagaacaaaccataccccaactcacggttttgccgtggtgttcctgatcccaagatcaggctttacgatgttggtatgaagaagaagggtgttgatgagtttcctttctgtgtccatctggttagttgcgagaaggaaaacgtttctagtgaggccctggaagctgctcgtattgcttgcaacaagtaatgggccatttgctggaaagga

SEQ ID NO: 13679 - DNA, 294 bp, Glycine max
  Clone ID: 701067557H1
attttgcgaaaccggctgaagtatgctctgacataccgtgaagtcattgctattctgatgcagcgacctgtccttgttgatggcaaagtcaggacagacaagacatatcctgctggtttcatggatgttgtatcaatccctaaaacaaatgagaacttccgcctgctgtatgacaccaaaggccgattccgtcttcactcagtcatagatgacgaggctaagttcaagctttgcaaagttcgctcagtgcagtttgggcaaaaaggtatcccatactgaacacctacgatggtc

SEQ ID NO: 13680 - DNA, 292 bp, Glycine max
  Clone ID: 701067558H1
agcaatgttcttctaaacctttctttctctagttagaaattaaggagaaacaattaactcaatggaaaaacaaatgtttccaacaaagtttcttctagttcttaccaccatatggtttgcactatccaattttgcctttaaagcttcagcagatgatgtcactcaaaccccaataacatgtctgaattgttccaaatgtgaatacccttgtcaacaacaaccctcacccccacttccttatgttgctccaccaccaccacaatcccctacaccttaggttactctatatatg

SEQ ID NO: 13681 - DNA, 288 bp, Glycine max
  Clone ID: 701067561H1
ccttcatcggcattgcgcttcacaaattctcagtctacgacttggtggatttcattaagttgtgataaacatgggaaaagactcaaagccaaaggagtccggaggcaagggaaaggggaaacaggctgcaagtggaagtgatgagaatgcttctaagggaaaaggaaaaggtgggaaaggtggagatgggcttggtacttgcacctatgtcaaagctaggcatatcctatgtgagaaacaaggtaagatcaatgaagcctacaagaagctgcaggtggttggcttggc

SEQ ID NO: 13682 - DNA, 286 bp, Glycine max
  Clone ID: 701067562H1
atccgatcctctgtcctctcgaagctttcatcgttcaacatattctcaccatctcagtcatgggactgctatcttgtattaggtctaccgtcctgagaaaatgttccaaaggaagctctggcatgtcaagattcctgtatacgaacaattttcaccgaaacttgatttcgtctcgtggcaatgaatcgtattatgggtattttaacacgagatcatacacttcactttatatgggaactcgaactgtgggtgggattacaagtgctagaatcaagtgccaaatgta

SEQ ID NO: 13683 - DNA, 297 bp, Glycine max
  Clone ID: 701067563H1
tggaagaagttaatgtcgtggaaactaaggatggaactgtctcagtagctgctgcgtttgctggtcaccaggaagccgtgcaggatagagaccacaaatttttaagcaaagctgttgaagaagcatataaaggggtagattgtaaagatggaggcccttttggtgccgttatagttcataatgatgaaatagttgctagttgtcacaatatggttctgtgtaacacagacccaactgctcatgctgaggtgacagcaataagagaggcttgcaagacgctaagcagatagaacttgc

SEQ ID NO: 13684 - DNA, 298 bp, Glycine max
  Clone ID: 701067564H1
gagctctagcgtagttcatcaaagccggtgccgaggagagagagtccatggcgagtcaacggagagactcatcctgaatccaaagctgaccgctgcaatgaatgtgtctccaaacgactccgcgaatatgggctccgatacgcagatttgtacgatccttactacgatcaggatgtgtaggaggcgatgtgtccgataccggtgaggtagtagcagctccatatacgtatctggatttcgagactctaaagagagtgacggaacctgtgaaacctgagtagtgttgtcttacttacaa

SEQ ID NO: 13685 - DNA, 305 bp, Glycine max
  Clone ID: 701067565H1
tttctatcttcttcaccttgctctcaccttctgggtaatgtttgaaacttggtgttagctgagctgtttgacaaaaatgaatattgcacaagttacagcatggcagcctgggatttgtgtgaaaaatatgtctcagttgcaccggcttcaatctaaaccatgtgttataccaaagagttttggtcctctcacttgtgttctactgagcttaagagccagacaatcgtttagctcgaaatgttggcccattttacaatctcggaaacctcttcatatttgcttagccggtgaaaagggatgatggg

SEQ ID NO: 13686 - DNA, 285 bp, Glycine max
  unsure at all n locations
  Clone ID: 701067566H1
ccggcaacaccaaaaccaccaccgcctctcctacctcccggagccatggccgccaccgactcctccgctgcttcgtcacgccagctttctccagagggagacggacatccaggtgatgctcgccgncgacgttcacctcggcaccaaaaactggggcttttagatggaangctacgtcttcaagcgccgcaccgatggtattttcataatttatcttggaaagacatgggagatagttcagcttgctgctaggattatagttcgcattgagaacccacaggatat

SEQ ID NO: 13687 - DNA, 292 bp, Glycine max
  Clone ID: 701067572H1
ctgaaaggcaagagtgagagagaaatggagaatgcggaggagatgatgcagcaaaacgacgaggttttgtcggttgaacttccagctccttccggttggaataaactgttttaccctaagaaactgggaacaccaagacaaagtgagattgtattcattgctccaactggagaggagatcagtaccaaaaaacaattggagcagtacctaaaggcacatcctggcaatcctgtcatttcagagtttgactggggaactggtgagaccctaggaggcagccaggatcagtgag

SEQ ID NO: 13688 - DNA, 287 bp, Glycine max
  Clone ID: 701067573H1
gctagattcgacgattcccgaagtgccttcctcctcctcctcctatcttccctctaatcggatccacgatcaaatccaaatccagttcaaagaagatgtcatacaagaacctggggcgatctggcctgaaggtgagccagctctcctacggcgcgtgggtgagcttcgggaaccagctggacgtgaaggaggcgaaggccctcctacagtgctgccgcgaccacggcgtcaacttcttcgacaacgccgaggtctacgccaacggccgcgccgaggaatcatgggcc

SEQ ID NO: 13689 - DNA, 287 bp, Glycine max
  Clone ID: 701067577H1
cgcaccgtgtttgggtgcagtcgtaatggtggtttagcgggtatggattggaagcagtaccgactcggacccaagaacatggattgtggcttcctgcttttgctcctcttcttccatctcttccttcctcactcctctggtaaacccagtggagcgtttgtttctcaaggaggtcgttttcctcccttcaaatccgaaggtggtgctcccaaaaatggtcctaaagatttgactctttgccggatttttcgcaaaaagacttgctgcgatgtaccatactcatcctg

SEQ ID NO: 13690 - DNA, 291 bp, Glycine max
  Clone ID: 701067579H1
cttcacttttaagttaaatagtttttcattgtttcatttaatctacaatggctgcttcaacaatggctctctcttcatcatcattggctggccaagctatcaagcttgccccctccacccctcagcttggtgttggaagggttagcatgaggaaaacagcctccaagactgtttcttctggaagcccatggtacggcccagaccgtgtcaagtacttgggcccattctctggtgagcccccatcctacctcactggtgaattcccaggtgactatgttgggacactgctgg

SEQ ID NO: 13691 - DNA, 276 bp, Glycine max
  unsure at all n locations
  Clone ID: 701067582H1
ctctccctctctccttccccaagatgtcgagcgccgatcccgagcaccgagaagaggaggaggcacccgccgtcggcgacgacgaggacaccggagcacacgtcgctcccatcgtcaagctcgaggaggttgctgtcaccaccgccgaggaggacgaagatgcaatcctagatctcaaatcgaagctttaccggttcgacaaggatgnggaacagtggaaggagcgaggcgcgggcaccgtgaagttcctgaagcttaaggctacgggcaaggtta

SEQ ID NO: 13692 - DNA, 296 bp, Glycine max
  Clone ID: 701067583H1
atttgatctgcgactgagtatagagaagagaattgtgatggggggaggacagggtcacggcacaacctacaaaggtgttaccattcatcagccaaagcgctggcacactatcaccggcaagggtttgtgcgcggtcatgtggttttgggtattctacagggcaaagcaagatggtcctgttgtattgggctggagacatccttgggagggtcaccatgatgatcatggcaagggccattagcattccttaggcatgagctccaagaacaggaagaacagatttgaagtgtctgttg

SEQ ID NO: 13693 - DNA, 288 bp, Glycine max
  Clone ID: 701067584H1
cgtcggtgctggggtttttgagaggcaggatcaggatgcaattcttgctgctgttgaaaccattgcacaaaaagcaaatgttgtcagacctgactggaatggccttaatgtattgcttctccatgctgcccaggctgctgcgcttgaccttggacttgttccacaatctgagaaaagccttgagtctgcaaaatttgtatatttgatgggtgctgatgatgttaacttagacaagatcccagatgatgtatttgttgtttatcaggtcacacggtgacagagtgttat

SEQ ID NO: 13694 - DNA, 290 bp, Glycine max
  Clone ID: 701067585H1
gcagtgactcccacaaggagactcaacattgagtacaatggcagtgacctatacgactcgttcgagttcaaacagatgactttacaactcaacgaggccattcaaacctcaaaagaatcttcaccagcttacagagagatgacgcacaggcacaagcttaaaaaggccattcagggctctaatggctcatcgccatcattagtcttccacctaaattcacccttttatcgtcgccacctgaagcgtctctacaaagaaagcacaaaggcaccaagagaatctctagtcct

SEQ ID NO: 13695 - DNA, 290 bp, Glycine max
  Clone ID: 701067586H1
cttgggacaagcatcttgaaacatgggtaaaagcttcaggtatccttggaggaccaaagaacacacctccaacagtaatatctcccaaacaatacaagaaaaggttcaggaaagcaatgaccacttactttctcatgcttccagatcagtggtctcccccttctattattcctagtcattctcagtctgattttggtgaagacagcacacaacctaggactccagctgaatgattctttgttttgtgtttctgtaaattttactttcaatttgggaattaactcccccaa

SEQ ID NO: 13696 - DNA, 291 bp, Glycine max
  Clone ID: 701067588H1
gtcgcgttgtgttgcgtcgtgtcgtgcgctgttcctctgtctgtcgtttttgttttcagaccaaaccctagctccgcatcgcaaccatgtcgaccatgcaaggtggaaaagctaagcctttgaagaaacccaagtctgataagaaggattacgacgaggttgacatggctaacattcagaagaaaaaggaagaggagaaggcgctaaaggagttgaaagccaaggcgcaacagaagggaagctttggaggttctgggctcaagacaagtggaaaaaataagggctctttat

SEQ ID NO: 13697 - DNA, 285 bp, Glycine max
  Clone ID: 701067591H1
tctctctctctgctcaactgaataaagcagagaagaataagaaaatgggtgtgttcagtacagtgctgctgtgccttatgtccctaatgtggatggtggatgctcgaattccaggcgtatactctggcggcgcttggcaaaatgctcacgctacgttctacggaggatccgatgcttccggcaccatgggtggagcatgtgggtacgggaacctgtacagccaagggtacggagtgaacactgcagcgttgagcacggcactcttcacagcgggctgagctgcgg

SEQ ID NO: 13698 - DNA, 286 bp, Glycine max
  Clone ID: 701067592H1
ctgttgtggaaaagccaggagactcttttcctaatgctgctaagtggtacgatgccgtctcttctcaacttgctccaagcatccctgggcacgctcacggggtaagattcagtggcgctgctgctccagctgaagctgcacctgccaaagcggctgccactgctgaagaagatgatgatgatcttgatctctttggtgatgagacagaggaggataagaaggcagcagaggaaacggaggctgctaaaaagcctgccaagaaaaaagaagtggcaagtcttctgtc

SEQ ID NO: 13699 - DNA, 189 bp, Glycine max
  Clone ID: 701067593H1
cagctaacgccatcgtttgagtggaatttcttgttatgtttaagcttgtaggatttaagtgtgtctcagattttgtttaagcttgaaattggaatacaagtgatacagatttttaatcattcgtaacttataatcagcttgctttttgaagagacgatattaattattaattaagaattttgttttttg

SEQ ID NO: 13700 - DNA, 282 bp, Glycine max
  Clone ID: 701067595H1
gccttcttctttttgttccccgtgcgtgtgcgtacgttgttcgtgaacaatatataacgacaaatgagcagtggcggaagggctgggaaacccaaagaggaggagcaagatggcatgtccgtccactctccttgcaaacctcctcattcctctgcttcctctctccccaagtcacaggttgtcttggagctgagattgttggaagctcttgagatttaccctccaatgaaactacaaggagtacatcgtcactttgtcctttatggtctgctgaatttctaa

SEQ ID NO: 13701 - DNA, 295 bp, Glycine max
  Clone ID: 701067596H1
tgagcagttcatcaaggccggtgccgcggagagagagtccatggcgagtcaccggagagaatcatcctgaacccaaagctcaccgctgcaatgaccgtgtcgaggacgttattcaggcttgctttgagggaaacccattcaagactgttccgggacctttcaagctcttctggcagtgcatgctttccaaacccggtgaggaaccaacagccccatttacttatctggatttggagcctctaaagagagaaacggaacctgtgaaacctgagtagtgttattttacttacaaatg

SEQ ID NO: 13702 - DNA, 294 bp, Glycine max
  Clone ID: 701067601H1
tcttccttggcctggtttatgtcaaaccaagaaactagctttgtcactattggtcaaagagttcttgctagaccactaaaggttcgattccactatggtcatccgagagtttttgatagaattttccattttacccgtggaggaatcagcaaggcttcttgtggcatcaatctgagcgaggatatatttgctggattcaactcaacactaagacgtgggaatgttactcatcatgaatatatccaagttggaaagggtagagatgtagggctcaatcaaatctctctttttgaa

SEQ ID NO: 13703 - DNA, 292 bp, Glycine max
  Clone ID: 701067602H1
tccgaggcgaagagaagagcaaaattaagatggaggggaaggagcaggatgtgtcgctgggagcgaacaagttcccggagagacagccgattgggacggcggcgcagagccaagacgacggcaaggactaccaggaaccggcgccggcgccactggttgacccgacggagtatacgtcatggtccttttacagagcacggatatcagagtttgtggccacttttctgtttctcatacatcactgtcttaaccgtcatgggagtcgccggggctaagtctaagtgcagtaccg

SEQ ID NO: 13704 - DNA, 286 bp, Glycine max
  Clone ID: 701067603H1
cgagaagctaagaggcgcagcgtagcaaaagctcgtggaattgctagcaatggcgaggatcaaggtttacgagctgaggcagaagacgaaggctgatctgctgaatcaactgaaggacctgaaggcggagcttgccttgcttcgtgttgctaaggtcaccggtggtgcccctaacaagctttccaagataaaggtggtgaggttgaacattgcccaggttttgacggtgatttctcagaagcagaaggctgcgttgacggatgcctacaagaataagaagtacttg

SEQ ID NO: 13705 - DNA, 289 bp, Glycine max
  Clone ID: 701067605H1
gaaaaaaagaagaacactccctcttcgtggacccgagcttcttcattagactcgagcctcactccctcttcatcgacccaagctctcatcaacacgagcttttcatcatatgcacacccttgactgttccgaacatttttcttctctcttcatctcttctctttacctcttcatttgaatctactacagttcaaatatcgttggggctgtggtaggcttggccgaagattcatttgggagataagattctatgtgtaggtacgaaagaccagtttgatacatggtctgc

SEQ ID NO: 13706 - DNA, 285 bp, Glycine max
  unsure at all n locations
  Clone ID: 701067606H1
cgctcttctctctagagctgctgcgttgctaaaacgcaccggtttgttcctgttctcgttcaaaagaaanacgacacaagtgaggcttggtgcataaacagcaatggcagaaaaaccccaaccggttcgggttctctactgcggcgtgtgcagtttgccccccgaatactgcgaattcggatccgatttcgagaaatgcaaaccctggttgatccaaaacgtccctgacctataccctgatcttctcaaagaagagaaggaagctgataaagttgctgacaaact

SEQ ID NO: 13707 - DNA, 274 bp, Glycine max
  Clone ID: 701067607H1
caattttctagggtttatacaattttcgatggcttcttcagatgttgagtaccgttgctttgtcggtgggctcgctctgggccactgacgcccaagctctcgagagagccttctctcagtacggcgaaatcgttgaaacgaagattatcaatgatcgtgagactggacgatccaggggttttggatttgtgaccttcgcctcggagcagtccatgacagacgccatcgaagggatgaacggccaaaaccttgacggccgtaacatcactgttaa

SEQ ID NO: 13708 - DNA, 75 bp, Glycine max
  Clone ID: 701067608H1
gttttcgactatggttgcattttttagtcgaccatgaaatgtgctctgagggatcaatctagttggatttggttc

SEQ ID NO: 13709 - DNA, 281 bp, Glycine max
  Clone ID: 701067609H1
gacatttgtgaataatggccagcctaagttgggcgagaaattgatgagggacatggatgatagacttattacaatcacaaaggacatatacatggcattgctccgttcttattctcaacttggtgatgttgcaagcgctgaacgaatttcaacaactatgcaatttgcaggaatccagcagagtacggataaggagacatgcaccctgcttgttgaggcatatgcacttgccagtaaccctgatcaggcaagaagccattttgactgcatgataaaatctg

SEQ ID NO: 13710 - DNA, 277 bp, Glycine max
  Clone ID: 701067610H1
agcacagaagagggaaaaccgcaccgccgccgtagaagaaaacaaccatggtgcacgtctccttttacaggaactatgggaagacattcaagaagccgcgtcgtccgtacgagaaggagcgtctcgacgcggagttgaagctggttggtgagtacgggcttcggtgcaagagagagctgtggagggtgcagtacgcgctcagccgcatccgcaacaacgcgcggaacctcctcaccctcgacgagaagaacccgcgccggatcttcgagggagaggc

SEQ ID NO: 13711 - DNA, 189 bp, Glycine max
  Clone ID: 701067611H1
cgacatcaccattcatccgatgagttcgagaggagcgaccgcggtgctatctcgtgccagcaggattcggtcgaagctgcaaacggcgctggaagccaccgttttggaggtggacgacgtgtcgtaccagcacgcgggccacgccgccgtgaagggtagttccgacaaagaaacccacttgcacacaac

SEQ ID NO: 13712 - DNA, 282 bp, Glycine max
  Clone ID: 701067612H1
ccctagctagccacaatgcagatattcgtgaaaaacctaacggggaagacgataaccctagaggtagagtcatcggacacaatcgacaatgtgaaggcgaagatccaggacaaggagggcatcccgccggaccagcagcgcctgatcttcgccggtaagcagctggaggacggccgcaccctcgccgactacaacatccagaaggagtccacgcttcacctcgtcctccgcctccgcggcggcgccaagaagcgcaagaagaagacctacaccaagcccaag

SEQ ID NO: 13713 - DNA, 285 bp, Glycine max
  Clone ID: 701067614H1
gtatcctccatggcaaggctttggaggtctggcccaaacagcggggataattacaagataatctctgtggaggggatgaatggtaggctttcaaatggaagggtatctagtgggggcataatgtctcctgattgggaacttggtaacggtggactaagcccccaagaccatctgtaccagttgagttcgcctgagtcagcaaatctgcataatcgcggcatgaaagggtgcattcctcgcaccgtgcagaagagtagtctgaaagccagacttttggaggctagg

SEQ ID NO: 13714 - DNA, 293 bp, Glycine max
  Clone ID: 701067615H1
tgggacacacagcacaaccaacacctccacagcctctcctacctcccggagccatggccgccgccgactcctccgccgctccatcgcaccagttgtcgcagagggagacggacatccagatgatgctcgccgccgacgttcacctcggcaccaaaaactgcgactttcagatggaacgctacgtcttcacacgcagaaccgatggtatttacataattaaccttggcaagacatgggagaagctccagctcgctgctaggattattgttgccattgagaacccacaggatatc

SEQ ID NO: 13715 - DNA, 287 bp, Glycine max
  Clone ID: 701067616H1
ggcatagataacaccggactctctaatatcccatactatcacaaacatggatatggggtcgaggaatttaatgaaaccttatatgacgaatgggttaacaagggcgacgcaccggcattgccagagactcttaaaaattacaacaagctgttgtctcttggcttcaagattgtattcttgtcaggaagatatcttgacaaaatggccgtaacagaagcaaacctaaagaaggctggcttccacacatgggagcagtgccttctcaaggatccaatcttatcactcca

SEQ ID NO: 13716 - DNA, 289 bp, Glycine max
  Clone ID: 701067617H1
atctgatctgctgaaacacgccacactcttcttaccatgggcctcctcgatcacttgtgggatgacaccgtcgccggtcctcgcccggagaacggccttggcaagctccgaaagcagcacaccttcgctttccgatctgcctccggcaaggaatcagacagcggaagcgtgaaatcgtacggtgaagatttgccggaggatgcggtgagagtgacgcgaagtatcatgatcgtgaaaccacctggtggtaaccagagtccgagcggatccgctccggcttcccccgccg

SEQ ID NO: 13717 - DNA, 289 bp, Glycine max
  Clone ID: 701067618H1
agcgaagaagatattagggtttttgagtgcggtgcggcgatcctagcactctcttctgcagctttcgccgacagcttcattcaccatggcatgacaaaccgagaaggcttttttgaaacaaccaaaagtgtttctcagctcgaagaaaactgggaagggaaagagacccggaaagggtgggaaccgcttttggaaatccattgggcttggatttaagactcccagggaagccatcgaaggaacctacattgacaagaagtgccccttcactggcaatgtttccatccgt

SEQ ID NO: 13718 - DNA, 287 bp, Glycine max
  Clone ID: 701067619H1
gagagagagcagaggaaaaggggaagaaaaatgttgagtgcgacggcgatcggcgcgttattgggtttgggaacccagatgtactccaatgctctccgcaaactcccctacatgcgccatccgtgggagcacgtggtcggcatggggttgggcgcggtgtttgtgaaccagcttctgaaatgggaggcccaagtggagcaagacctcgacaagatgctcgaaaaggccaaggccgccaacgaaagacgttatatagatggagatgatgattaatgcatgtcttcatg

SEQ ID NO: 13719 - DNA, 286 bp, Glycine max
  Clone ID: 701067620H1
tccatctcttgtttcttgctttctttcttcaccatgtcacttgctgggaaaatcaccactgaaatcggggttcatgcaaccgctacaaagtggttcaacctcttcgcaacacaactccatcatgttcaaaacctaactgatagagtgcatggaaccaagctgcatcaaggtgaagactggcatcacaacgagacagtcaagcactggacttataccatagatggtaaggttacaacatgtctggagagtattgaatccattgatgaacagagcaaaacaatcacct

SEQ ID NO: 13720 - DNA, 283 bp, Glycine max
  Clone ID: 701067621H1
aaacaagtagttgagaactaagaagaaggaaatggcttcctcaatgatctcctccccagctgttaccaccgtcaaccgtgccggtgccggcatggttgctccattcaccggcctcaaatccatggctggcttccccacgaggaagaccaacaatgacattacctccattgctagcaacggtggaagagtacaatgcatgcaggtgtggccaccaattggcaagaacaagttcgagactctttcctacttgccagacctcgatgatgcccaattggcaaaggaa

SEQ ID NO: 13721 - DNA, 284 bp, Glycine max
  Clone ID: 701067622H1
caaccatatctattcttacaagttacatccattgagaaacatgaaggtctcccccttagcattttcaatcctttttttgtccttcaccatagaactcttcattggcattgcttcagcagcacaagaaccagtgcttgacacctcaggccagaagctgagaacaggtgtcaagtactacattctaccagtcttcagaggcagaggtggaggcctaacagtttcaagcagtggcaacaacacatgccccctctttgtggtgcaagagaagcttgaagtctcaaagg

SEQ ID NO: 13722 - DNA, 281 bp, Glycine max
  Clone ID: 701067623H1
cctagattcagccacagttggaaaaaaaaaaaaagttgttcgagatggcacgtacgaagcaaaatgctcgtaagtccacaggaggaaaggcccctaggaagcagctcgcaaccaaggctgcacgtaagtctgcaccaactactggtggtgtgaagaagccacatctctatcgtcctggtaccgttgctcttcgtgagattaggaaatacgtgtagagtaccgagcttttgatcaggaagctccccttccagaggctggttcgtgaaattgctcaggacttc

SEQ ID NO: 13723 - DNA, 281 bp, Glycine max
  Clone ID: 701067629H1
ggcgaatttaaatggcaatcccacttttttggttatgaagggaggtgtggcttgcctactaattttgatgctacttattgctatgctctgggttatggtgctggagccctccttcatagtgggaagactggattaatatcatcagttgccaatttatgtgctccggtagaagaatggactgttggtggaactgcactcacctcactgatggatgtggagaggaggcatggtaaattcaagcctgtgatcaagaaggcaatggtggaacttgaaggggcacc

SEQ ID NO: 13724 - DNA, 268 bp, Glycine max
  unsure at all n locations
  Clone ID: 701067630H1
tcagagccaccgagagcaaaaccctagttcatccatcaccagtcgaaatcaaaaatngtgaanttccttaagcccaacaaggctgtcatcgtcctgcagggccgctacgccgggcgcaaggcggtgatcgtgaggcccttcgacgagggaaccagggagcgcccctacggccactgcctcgtcgccggaatcaagaagtaccccagcaaggctctcaagaaggactccgccaagaagacggccaagaaatctagggttaaggcgttcg

SEQ ID NO: 13725 - DNA, 289 bp, Glycine max
  Clone ID: 701067631H1
aattgatgaactagtgtgacattagagaagaaccaatttaaaagaagagcagcggagctaaagagcgggagaggagagaggagaagagaagctaaagaaagaaaggagatgggagtggagaagcagttgttgaggtctggcaccggtccgaagccaattcccggtcagaacgtaaccgttcactgcactggtttcgggaagaacggtgacctttctcaggaattctggagcacaaaggatcctggccagaacccattcactttcaaaatcggccaaggttctgttatca

SEQ ID NO: 13726 - DNA, 207 bp, Glycine max
  Clone ID: 701067633H1
gctaaaccttaaaccctacttttgcaatcagtgagtgtagcgatgagtagtcgttgatgggtcggcgaacgactaacagctcgattcctctatggtcatccggtcatgtttgctctgattttccattttacccgtggcggtatcaggaaggcttcttgtgggatcaatctgagtgaggctatgatttgctggattcaactcatcact

SEQ ID NO: 13727 - DNA, 287 bp, Glycine max
  Clone ID: 701067634H1
cacaaatcaaagccatggccacctccaacttctctattgttctctccgtctccctagccttctttttggtgctacttaccaaggcacactcgaccgataccgtttctttcaccttcaacaagttcaacccagtccaaccaaacattatgctccaaaaagatgctagtatttcatcctctggggtgttacaactcaccaaagttggcagcaacggcgtgcccacctcgggatctctcggtcgtgccctttacgctgccccaatccagatttgggacagcgaaaccggc

SEQ ID NO: 13728 - DNA, 282 bp, Glycine max
  Clone ID: 701067635H1
gtgagaatggagagcaaagaggaagatgtaagggttggagcaactaagttctcagaaaggcaaccaattggtacagcagctcagggtgacaaggactacaaagaaccacccccagcacctttgtttgagcctggtgagctaaagtcatggtccttctacagagctggaattgctgagtttgtggccactttcttgttcctctacattaccatcttaactgtcatgggtgtcaacaggtcaccctccaagtgtgcctctgttggcattcaaggcattgcttgg

SEQ ID NO: 13729 - DNA, 284 bp, Glycine max
  Clone ID: 701067636H1
tccagacagcagcagcaacaacaaacaaactctttctggattcagtttttgatgtgaaaatggcagtgactcttacatcaacactctttctggctttgctatttgctgcttcagcttttgctgctcttcagcctagagtacctgaagcttacctccaaaatgggaactttgaggagcagccaaaccctaaatacctgaagaaaacaaagctctttggtaaatacgctttgcctaaatgggagatcaatggtctggttgagtatgtctctgggggtccccaacct

SEQ ID NO: 13730 - DNA, 283 bp, Glycine max
  Clone ID: 701067637H1
tcttaactcatcagtttcaagtcgcagaaatgaacggtggcgcctttgattttatcgaagaaaacggaaacgggagcgactcggactcgaattctgatgacgcgccggagtactaccagccgatctccgccgtggaagacagtgggagttcggacgacgagcacgacggtgaattcggacacctcccgaacggttttgccgcgcacggcgtggtggagaacgggatctcgtctctggatctgaacgacattacagagaagagcagcagcgacgaggaggaaga

SEQ ID NO: 13731 - DNA, 281 bp, Glycine max
  Clone ID: 701067638H1
ctcttgtgtatacagacactgcttgtagccaatgacaaacttcttgctgaagaaggaaatgggtggttgttttgggacaacacgtgccaatggccaaggatgaagcattagtttcgagatccaaaggagcaacaaaatttggtattgcaagcactagagctgtgatgttaacatgttttaaatttgtaaaaccaatgtgtgcttgttcattccattgtaattttgtatacttaccattgagaagattagttagtggtgcaattatgggcgtgcaacacggt

SEQ ID NO: 13732 - DNA, 112 bp, Glycine max
  Clone ID: 701067640H1
atgtgatagtaatgatggatatggtgactgttggaagagtcactcaaaggaatttgattccaattccgggttggttgaattcaatggtgtccattactataagtttacaact

SEQ ID NO: 13733 - DNA, 274 bp, Glycine max
  Clone ID: 701067642H1
ctctttggtgtttgggtagcaaaatcagagagagaatagcaataaccggtttgctaatggaacagcagagcacttgttttcttttccacttaggataacagtatttgggatttgtacctgctgaggaaaacggaagtgatgatattgagaaacctggaggcatttgtgcctattattaaagcaggatggaggttttctaagatctactgttttatacacgttacccaaacctatttgatcgcccctgctgtgacctatggtcctagcatgcttc

SEQ ID NO: 13734 - DNA, 252 bp, Glycine max
  Clone ID: 701067644H1
ctagactctagttatatcgattagctattaagttggatatatataggatgttctcaaatgcattagcagtaactgtgatctcctcagttgcttggattggatatgaggtatattacaggctacagatctttcaatgagcgctggcaaagtgcttagatcatcaatgcattctgggaattctagcattgcattactctgtgtatatgctatcctgggcccatccaagctctcaaagtagcaattcgagcatgg

SEQ ID NO: 13735 - DNA, 277 bp, Glycine max
  Clone ID: 701067645H1
gtagaagtagaagcttcacttcactctgttcagttcttattgatagatcaataatctgtctctattattgttattatctttctctctcctctttgtgcattttaatagcaactcttagtttccaatgtccaagatgttgggagtgtttgtgggacttttgctgttggtggggttggctgcctctcccaagtttgatgaactcttccagctcagttgggctatggaccatttcatccatgaaggagaacttctcaaactcaaacttgataactattct

SEQ ID NO: 13736 - DNA, 282 bp, Glycine max
  Clone ID: 701067646H1
aaagacttgcttccaagatggttctgctagagaagctctgggatgacgttgttgctggccctcaacctgagcgtggccttggcaagctcagaaaactcaccaccctcaaaactattgatgaaggagacagtagcaagctgcagaagacgttgtcgatgccgtcgacaccgacaaccccgatgactcccacgactccaacgacaccgggatccgcgcgtaaagctgacaacgtttggaggagcgtcttccatcctgggagcaatccgccacaaagaccatcgg

SEQ ID NO: 13737 - DNA, 240 bp, Glycine max
  unsure at all n locations
  Clone ID: 701067648H1
catcattaaccaaataaaaaacatcaaaattaaaagatccaagcatggggcaacacaaagactggancaagactgaggatggtgcttgtctgtctgcaatgctgcttagtactaatctagtgtaccctgcagtactgaatgctgctattgagctcaacttgtttgagatcattgctaaggcaacaccagctggttcttttatgtcatcccatgaaattgcttctaaggtccaacacaaca

SEQ ID NO: 13738 - DNA, 176 bp, Glycine max
  Clone ID: 701067650H1
cgctctaatcctgttccattgaagcgaaggttttcaaatagtcctagcactgtggacttctttaatgtcaggttctagagtcaaactcttagtaattttctatgaagtgtacttgatgaatcttccattcttgagaactggatgtttcaattacattcgtggtgaatcattgcttt

SEQ ID NO: 13739 - DNA, 282 bp, Glycine max
  Clone ID: 701067651H1
gcaaaattgattgggaagggaaggaagttggaagattgagaggttcaatctcaatggccacgcttagctttggactagccacgacaagtctgagtgctgccgctggttatcgtagaagaagacccacaattgtgtgtattggatggtctcgtgatgttcccgatactccgcaatacctcatcgaatacttcctcgacactgaagctcaggagattgagtttgagattgcaagaatgagaccgcgattgaatgaggaattctttgcacaactcaaattcgagt

SEQ ID NO: 13740 - DNA, 283 bp, Glycine max
  Clone ID: 701067652H1
gcgaaagagaagatggccaccgttccagggcagctcgtgtgggagatcgtgaagaaaaacgccgtctttttggtcaagcagttcggaagggggacccagagcgtcgaattcagcagagagagcaacaatctctacaacctcaattcgttcaagtactctggtttggcaaacaagaaaactgttacggtacagcctgagggtaaagatcaggctgtgttgttggctacaacaaagacaaagaagcaaaacaagcctgctgcattgcttcacaaatctgtgatga

SEQ ID NO: 13741 - DNA, 275 bp, Glycine max
  Clone ID: 701067653H1
gagataactagaaacagtgtgatgaaaatgaaggtccttgttttcttcgttgctacaattttcgtaccctggcaatgccatgcgtacgatatgttccctctccgaatgaacactggctatggtgcccgtactccggaggtgaaatgcgcaagttggaggcttgctgtggaagcacacaacatctttggctttgagaccattcctgaagagtgcgttgaagcaacaaaggaatacatccatggcgaacaatatagatcagactccaaaacagttaa

SEQ ID NO: 13742 - DNA, 255 bp, Glycine max
  Clone ID: 701067655H1
tgtcgcagcaattagggttcgcgatcgagctatacctagaccctgcgttggagaatcacgttctgaaagcatggaaagttcttacgagaagacaaatcagcacgcacctgatagccatggagtctcggccacacataaccctattctcggcgccatttctacaaccttcgaagctcgaatctctcctgaaaggcttcgcatcgaagcacgatcctctccctatcacctactcttccctcgccactttcccaaacg

SEQ ID NO: 13743 - DNA, 277 bp, Glycine max
  Clone ID: 701067656H1
cgtagaacacagaaaaagaaaagaaaagaacaaacaaacgatggggtggccattcagcagaataggagcttctgggttttcatcatattctactgccaaggaagttactcatggaatcgatggaagtggtctcactgctattgttacaggaatttgtgctgccccttttgcactatccaaggataacattgaacttcaatttgccataaattacatagttacaacaattggtgtgcatatggacaatcaaagcttgctaatattttgcatgccaatg

SEQ ID NO: 13744 - DNA, 274 bp, Glycine max
  Clone ID: 701067657H1
gcgcctctgcctgtaagagtgaaaaaaccttctcttttccttctctcaagtctcaagagatttcatcatggctccaaagaaggacaaggctccaccaccttcctccaagcccgccaaatctggcggtggcaagcagaagaagaagaagtggagcaagggaaagcaaaaggagaaggtgaataacatggtgctgtttgatcagggcacctatgataagctcctttctgaagctcccaaattcaagctcatcactccttccattctttctgatcgt

SEQ ID NO: 13745 - DNA, 106 bp, Glycine max
  Clone ID: 701067658H1
ccctgttcgtattcctattggatcgatcgataacataaataacacttcttcttgccttttaatatatttggctctcttcccctcttgtttcacctttccacacaac

SEQ ID NO: 13746 - DNA, 275 bp, Glycine max
  Clone ID: 701067659H1
taagtattctcataagaacaaaggacagacaaagagagagatggagaactttcccgtgatcaacttggagaatctcaacggtgaggcgaggaaagctaccctgcaccagattgaagatgcttgccagaactggggattttttgagttggtgaatcatggaataccccttgaacttttggatacggtggaaaggttaacaaaagagcattataggaaatgcatggagaagaggttcaaggaggcagtgtcaagcaaagggttagaagatgaagtaa

SEQ ID NO: 13747 - DNA, 278 bp, Glycine max
  Clone ID: 701067661H1
ccgaaaagttagtgctggtatcagacatggcttccactatgaagcaggttccctctaatttcatcaggccactcggtgaccgtccaaatcttcaaggcgtcgtccaatcctcagatgtttgcattcctctcatcgatctccaagaccttcatggccccaatcgctcccacatcatccaacagattgaccaagcttgccaaaattatggattttttcaggtgacaaatcatggagttccagagggtgtgattgacaagataatgaaggtgacaagggag

SEQ ID NO: 13748 - DNA, 82 bp, Glycine max
  Clone ID: 701067662H1
gcagcagaatttcttgtgctaccaacagcagagttaatgtatgtctagtctttttcttttgcattgatgtacttttccattt

SEQ ID NO: 13749 - DNA, 207 bp, Glycine max
  Clone ID: 701067663H1
gcatggttctatcaaacaagaaactgaagcttaagctgagagatgaattagcccaaagcaactccaaacgccgccgctgaacccccttcattttctattaataataataactctctcaaaactcttctggactctgccacgcccacacccagattcttcaagagagagaagcgaagaaagcttcgatccgaccaacctccacacaac

SEQ ID NO: 13750 - DNA, 257 bp, Glycine max
  Clone ID: 701067664H1
tgtcaggtcagtggccagagcgaatttttgaaaaaggaggatagtcctccttatacgttctagaaccgggcatggcagggcatgtcactggggtacactatctgtccattttcatggcattattgcactttaaaaagaaagaatgtaggtccctagtttgtttgtgcccaggctcttgcatgtacacttacaggtgattaaccaactttggttaagtttgtccatccaagacacccatgtttgaggatgaaaacaat

SEQ ID NO: 13751 - DNA, 283 bp, Glycine max
  Clone ID: 701067665H1
ctcaaggagatggctctgggaagaggcagtgcagtggttctactactttgcttcttgctgcttcactctcagatggctcgtgctgccacctacacagttggagattctgggggttggacctttaacactgttgcctggcccaaaggaaagctctttcgggctggtgacacacttgctttcaattatagccctgggactcacaatgtggtggccgtgaacaaggctggatatgatagctgcaagactccaagaggagccaaagtgtataagtcagggacggatc

SEQ ID NO: 13752 - DNA, 271 bp, Glycine max
  Clone ID: 701067666H1
gctgtttccttctctcacgctaccgccatcgttcatcaacggccaccctcaacctctcttcgttgcaagctctctcctcgcatcgtttatgctcttcttttccccaaaatacccctactccttccttcaatttccagctacaaccctcaattaacccgcgcccaatttctctgaaaccctacgtctccgagaagcctcgcgcgcgcgtggtggcattggccgtgaagagcctcggcgatacggaggcgctggcggtgtcgcctgataatga

SEQ ID NO: 13753 - DNA, 281 bp, Glycine max
  Clone ID: 701067667H1
gacagaggcaaccttgtttcagttggttggtatcataccatgggacaagtctttgacaagttagagggtaaggagtggaggcaaaggcaaataaggaacgataacagatcgagtttttgacaaagtaaagaatcacatagaaactgataacttgagtcttgaagatctgtatattgctgttttacttgtgtacaatgatatcaacaagtatatacctggtccccattttgaccctccatcaaaagacaaagtcagagaagtcaaacagagctgtgatatca

SEQ ID NO: 13754 - DNA, 280 bp, Glycine max
  Clone ID: 701067669H1
cgctttcgctcaccggtgtgcagtcgagcccccgaagaaaaagcgaaaatgccgtcgcacaagacattcagaatcaagaagaagttggcgaagaagatgaggcagaacaggcctatcccctactggatccgcatgaggaccgacaacaccatcaggtacaacgcgaagcccgtcactggcgtcgcaccaagcttggattctgaggtgcttgctttgcctcggttctgtttatccaattaattagtgttttattttcttgagccaaaaacaatgctttggg

SEQ ID NO: 13755 - DNA, 276 bp, Glycine max
  Clone ID: 701067670H1
ggattgtggctaaggctggggacactgttgaggtgcgtgatgggaaactactggtaaatggtgctgctgaagaacggcaatttgtagtagagcctctagcttatgagatggatccaatggttgtgccagaaggatatgtgtttgtaatgggagacaatcggaacaacagctttgattctcataactggtgatgaaggtttccagatacgttcatctattctaaattgacagtttctcccgtctttgcctgggaatgagctgttcggagattctctt

SEQ ID NO: 13756 - DNA, 141 bp, Glycine max
  Clone ID: 701067671H1
gtcgattggaatttggaatagaccataaaattggtttggaaatgatatatttacccaaatcaaacactgacccgaatcaataaaaaacagcactaaaagccgcattaaagaaaaaccatcgccactgcaaccttccacaca

SEQ ID NO: 13757 - DNA, 270 bp, Glycine max
  unsure at all n locations
  Clone ID: 701067672H1
acttatgtcantaattcttattctcttcatctctctctactctacgacacggaggttgattataagacctgattgctggaaattacatggcgtcagctattaagatcctataacttctctttggcttctctggtagctaaggaaattttggttggaggtacgactgatgcatggacggtttcagcctctgaatcagattcactccaccaatgggcagagaagtctcgtttccaagttggagactatcttgtttggccatatgatagtgga

SEQ ID NO: 13758 - DNA, 273 bp, Glycine max
  Clone ID: 701067673H1
attcaacagttgcagagtgaaacgatgccgtgcctcaacctctccaccaacgttaacctagacggcgtcgacacctcttccattctctccgaagccacctcaactgtcgccagcatcatcggcaaacccgaggcctatgtgatgattgtattgaaaggatcagtgcctatatctcatggtgggagtgagcagccagcagcttacggtgaattggtgtccattggtggtcttagccctgacgtgaacgagaaactcagtgctggcattgcttca

SEQ ID NO: 13759 - DNA, 272 bp, Glycine max
  Clone ID: 701067674H1
cattactacaaagttagacaacatggcagcggtggccggagcatcctcgtccgtgattaaggtggctgcactttccggatctttaaggaaaggctcttacaacagagccctccttcgttctgctattgagctaagccaaggtagagttgaaggccttcaaatcgagtacgttgatatttcgcctttgccccttctcaacaccgatcttgaggtgaatgggacctaccccccacaagttgaagcctttcgccagaagattctcgcagctgata

SEQ ID NO: 13760 - DNA, 272 bp, Glycine max
  Clone ID: 701067675H1
tttgtctaatttctcattcttaatctttgtctccctttgccaggttttttccttccttgtacacttgatgtattttcactctgtctctgcagatggaaaattcgagaagtcagcaatagcggactttgtcttctccaacaagcttcctttggtaacaatttttacaagagaaagtgccccatcagtctttgaaaatccaatccagaaacagttgttgctgtttgcaacttcaaatgattcagcgactttggtcccagcatttaaagaagcag

SEQ ID NO: 13761 - DNA, 279 bp, Glycine max
  Clone ID: 701067678H1
cgccaagtgaaagtgagacaaaataaaaatcaaagagcataatgtcagggctcattcaccagattggggagaccttcatgtgggagggcacaagaaggaggaggagcataagggtgagcaccatgctggagaatacaaaggggagcaccatggtgaacacagtagtgagtacaaaggagagcatcatggtgaacacaaagctggagagtaccatggtgagcacaagccagagcacaaagaggggttcctagacaaagtcaaggacaagatccatggtga

SEQ ID NO: 13762 - DNA, 283 bp, Glycine max
  Clone ID: 701067679H1
aaaacaatgaagtgagattgcaacttgttgtttcatttactagataaccatctgattaatcggatctcattaggtggtatgatgacaacatatataaaattttcttggacaacttagctgtatatctttcttgtaatttgctaatcgcagttatgctgactttttagtttaacttcaacactgtctatttacacattgcttgaacatcctttgatgcagatccaatggatatctcttcgatgtaaaaagtcaaaagaaaaggccatcttgcttgaatgggatg

SEQ ID NO: 13763 - DNA, 287 bp, Glycine max
  unsure at all n locations
  Clone ID: 701067680H1
gaaagagatcgcagacacagagcagaatggcttctacccaatatcctcatgcaccancatgctcttaccacccctgccagtgccagatccccatcactacgcatcttggttagcaccaagcctaaccagcttgtttgcaaggcacagaaacaacaaacaccacaagaggatattgatgtcagcccaatctctcgccgtttagctctaactgtgctcattggtgctgctgctgttggctccaaagtccaacctgctgatgcagcctatggtgaagctgccaatgtgtt

SEQ ID NO: 13764 - DNA, 281 bp, Glycine max
  Clone ID: 701067681H1
ggggtactcttgagagtgttggtgatcaatcagagtatgttaatgccataaatttgatcctgaccattagcattcctgcacttggaagtcttctttcacctgtctactttcagttctttctggataagcttgcatcatctcttggtccacgcttttattctaacattttcaaatgcaagcaaatatcagaaactggagctcaacagatgctattagatacccaagctgtaaagacgattcttcttgaagttccttcccttggtagacagacatcaggtgct

SEQ ID NO: 13765 - DNA, 256 bp, Glycine max
  Clone ID: 701067682H1
atcaaattagttcattctctttgcgcagttccctacctctcctttcaagatgcagatcttcgtcaagagcctcaccggaaagaccatcacccttgaggtggaaagctctgacaccatcgacaacgtcaaggccaagatccaggacaaggaaggaattcccccggatcagcaacgtctcatcttcgccggaaagcagctcgaggacggccgtaccctcgccgactacaacatccagaaggagtcaaaccttcacctt

SEQ ID NO: 13766 - DNA, 277 bp, Glycine max
  unsure at all n locations
  Clone ID: 701067683H1
ctggtctttcccttctcactctcttctcttcacaataaaaatccaatctgtgttgttcagcgcagacgccaaatcaaagcgcgtgagaaaagcagaaatcgcggcggctacggcgatttctcagctaggctgtttttccgccgtccaccgcagctcacacctccggcgccgctcgtttctgttcccttcccctcgctccaagttatcggttgttatgagtctggagaggcatgacacggatactgctgggtctgataccanaaatacactaagttat

SEQ ID NO: 13767 - DNA, 272 bp, Glycine max
  Clone ID: 701067687H1
ttgtgattgtggatgcatcggaagcagaagagttctctgaagtgttctcaaagcctctcagatctcttccttatgattcacctgggcaaacatttgtggcttttgagaagcctgagggattgccaattgacggaaaattttcgaatgttctgaaatttattgttaaagaggttgacccaaccactggtgagacagaagatgatggtgttgaagatgaataccaactggaggatttggaggttgtcacagcagactacatattgaaagtgggg

SEQ ID NO: 13768 - DNA, 272 bp, Glycine max
  unsure at all n locations
  Clone ID: 701067688H1
ccgttcgagctcattaattgcaagaatggcacttcgttngttggtgatgtcactttctgttctacctcatcttggtcttgcgagagaaagccatgccagagacgaagattttcggcatgctgtttggccaaacactcccattccaagttcattgcgagctcttctaaagcctggccctgcaagtgttgaaatcgctgatcatcctatggcaattgaagaccacacagtatccgaaaaccttcttctatacagatgacttcattcaggcaaac

SEQ ID NO: 13769 - DNA, 270 bp, Glycine max
  Clone ID: 701067689H1
gtcgttggctagtagacgcaaagaacggagtgctgtggtgcaaaataagaagcattggttcctctttctcagcgattgagcgagaaagcaaagacagtcatggcgtcgtttcttcaatggtttctggatccgaagaagaactggttcgccgctcagcacatgaaatccctctccagacggcttcgcaaatacgggctccgatatgacgatttgtacgatccttactacgatctagatgtgaaggaggcgctgaatcggcttccgaaagag

SEQ ID NO: 13770 - DNA, 270 bp, Glycine max
  Clone ID: 701067690H1
gttggtaaagaaagagaagaaaagagtggaatcgaagacgaagacgaagatggaggacgcatcagcatcaaagttcatcccacaccaaatcggaggggtccaaaacgacgtccttcgatttggtctccatggagtcaagagcgacatcgttggttcccaccctcttcaatcttcactccaatctacaacgagaatggatgaagcgatgaagaagcaatgcaaagttaacctgtacggaactgcttttcccctgaaggaggagcttgacag

SEQ ID NO: 13771 - DNA, 272 bp, Glycine max
  Clone ID: 701067691H1
atctcctacgccgacatgctcaagggatcacatggatgtcaacaacttcaactatcctccattgtccgagatgtaaactacagctgtggctcgtgtggttatgagctgaacttgaactccagcaaccgcaacacttgttctctcattgactcaaagtccataaagagaggcatcatctccttcttctccgtggatgagagcaggttcactcagatccagcaacttcactggccttcttggatgccctttttcaactccaagcgccaaagaac

SEQ ID NO: 13772 - DNA, 271 bp, Glycine max
  Clone ID: 701067692H1
agatttctgtgtttgtcgtttctgataatctggagtggagctaggtcaagatgccgtgggtttccttgtttgtggatcacaaaagaaattgtgttcgcttggtggtgttttttcgtgtgattctgtaatttaattagctcaggtgtagtcccattaggttgcgaagaactcttttcattaggttgttctccttttcatttccaaagctgttggggggactgaggatgtactttgcggtaacaataaagagataccaagctgtgaaggaagt

SEQ ID NO: 13773 - DNA, 276 bp, Glycine max
  Clone ID: 701067693H1
ggttcttgtgtgtatcttgaactgtgaaagggatatccgctttgaacttttagctcggctttgcccaaattctaccggagccgatataaggagcgtttgcactgaagctggtatgtatgctattcgagccagaaggaagaccgtgacagagaaagacttccttgacgcagttaataaagtcatcaaaggataccagaagttcagtgcaactcccaagtatatggtttataactgagtaattctttcctctatttcccagaaactatattagcggtt

SEQ ID NO: 13774 - DNA, 279 bp, Glycine max
  Clone ID: 701067695H1
atggggtggaggaatttaatgaaaccttatatgatgaatgggttaacaagggcgacgcaccggcattgccagagactcttaaaaattacaacaagctgttgtctcttggcttcaagattgtattcttgtcaggaagatatcttgacaaaatggccgtaacagaagcaaacctaaagaaggctggcttccacacatgggagcagttaattctcaaggatccacatcttatcactccaaatgcactttcatacaaatcagcaatgagagagaatctgttga

SEQ ID NO: 13775 - DNA, 168 bp, Glycine max
  Clone ID: 701067701H1
tggcaacgtttttctgcctatgcaagtttgctacgttcagcaacattagctcacgaaccttctcttcgttcttaccctccaaaacttctatctaccacagcttgtcctcttcttctgcaacattctcattcacatgggacgatgcctttcgcatatctcaacctcaaa

SEQ ID NO: 13776 - DNA, 151 bp, Glycine max
  Clone ID: 701067702H1
gacactcacgaaaaggtcctgggcgtaacaaactcttatataacaacacccttctttttctcttttcagtttacgtttacgtttacgcattcactcgcttatatcgtcttcctccgtttttttctttctcgtgaaacgcttcttccaacta

SEQ ID NO: 13777 - DNA, 164 bp, Glycine max
  Clone ID: 701067703H1
gtcagagaaaccctaggtaagaagaaaagatgccggctggtcatggtttgagatcccgcaccagagattccttctctcgtcctttcaggaagaagggaaccatcgccctcaccacatacctgagaacctaccacgtcggcgactatgttgacgtcaaggttaac

SEQ ID NO: 13778 - DNA, 189 bp, Glycine max
  Clone ID: 701067704H1
acgtaagctcacgattcggattcagctcgagcttgatcttcaagcgcaggaatggaggtcgcaacaaacacggccgcggccacgtcaagttcattcgatgctccaactgcggcaaatgctgccctaaggacaaggctatcaagaggtttctggtgaggaacattgttgaacaggctgcagtcagagatg

SEQ ID NO: 13779 - DNA, 163 bp, Glycine max
  Clone ID: 701067705H1
gcaggaatgtattcatctgaagccacattggcagatttgcctggtcttatagaaggtgctcacttaggaaagggtcttggtcgtaattttttgaggcacctcaggaggacccggctattggtccatgttgttgatgctgccactgagaatcctataaatgact

SEQ ID NO: 13780 - DNA, 164 bp, Glycine max
  Clone ID: 701067706H1
tgtggttttgaaacggaagagaagagtgtgagtgagagtgggtggagaaggggaagaagatggccagaacacaatcaataagaaacaagctgtcaatggcgccgtgaataaacatggcaaagctgcagaaagttcaggctctgatgaagaatgagaagtttttt

SEQ ID NO: 13781 - DNA, 185 bp, Glycine max
  Clone ID: 701067709H1
gcgtagtacgtcggattcggctcacctcgagcgaatcggctcgagtttcttcctttgtcgtccatccactaaccatgtctcagcctgttgtcctcaaagtacgtatgtcatgtgaaggatgtgttggagcagtgaagagagttctaggaaaattggatggtgtggaatcatatgacattgatttg

SEQ ID NO: 13782 - DNA, 147 bp, Glycine max
  Clone ID: 701067710H1
cggctcgacggtctcgaggttcaaagctgaggccataactgctatcatgaatgactttaacgagcctggatcacttgctccaactggattgtttctcgctgccaccaaatacatggtcatccagggcgagcctggtgccgtcattcg

SEQ ID NO: 13783 - DNA, 143 bp, Glycine max
  Clone ID: 701067711H1
agattgtgcaccattctcctttcttcttccgatttcgaagatggctgaagcagaggatgccgtaagacgccgtaatgcggtcgccgagtatcggaagaaacttctccagcacaaggaattggaattcagagtccgatccgtca

SEQ ID NO: 13784 - DNA, 158 bp, Glycine max
  Clone ID: 701067712H1
cgaatgttattcttctcatatatgatagaagacaagagcgcaggtggcttctcctatgtagaatttcttatccatgttcataggcaaattcaaaataaaatgtcatcataacgagtatatggcagcttcatttttgcaagcttttagacctaaatgat

SEQ ID NO: 13785 - DNA, 159 bp, Glycine max
  Clone ID: 701067713H1
cagattcaaacgaggtttccaaggacttcccagacattgtgattggcagtgcggatgcaacagtggaacgactggctgcgtcaaacatgttctttattgcaaagcgcaagaatgcaaaccaggacgtgttttacttctcagctaaactccctagaggga

SEQ ID NO: 13786 - DNA, 62 bp, Glycine max
  Clone ID: 701067715H1
acgagttcttgcactcgttagaccaattcctcgtcttgacaacttttccacacaacatatga

SEQ ID NO: 13787 - DNA, 160 bp, Glycine max
  Clone ID: 701067716H1
cccaaaactacttcttcaggaagaaagagcttagtttttcgtgtgcaaaacattgaccatagaattgaaccaattcctagtcatttgatggcttcagacaatgaattctcagaactcaacagaaatctttacccgcaaatagaaccctacagtacaggat

SEQ ID NO: 13788 - DNA, 176 bp, Glycine max
  unsure at all n locations
  Clone ID: 701067717H1
aaagcggggaaagaggctagagatctttgaaattcaagaatatcattatcgacagattcncancgaaaaacatctcacagcatggtttatcgccatttggattattagctcttcctctgtttcctctgtttagagatctctgtatcgtcccttcgattgcacggtttggaccaaga

SEQ ID NO: 13789 - DNA, 158 bp, Glycine max
  Clone ID: 701067722H1
gttttgtcatctaagacaacctagtgagagtaagcacacattgatcagcaacaatggcagcctactcaagccatgctttgaaaaccatccctttttcttcctttgtgaagcctgtcagtaccaaaccaacatcattcttcacaccttcacctaccaaa

SEQ ID NO: 13790 - DNA, 157 bp, Glycine max
  Clone ID: 701067726H1
gtttcatagcagcaatggtgtacgtcaaggctcagaaatcaaaagcctacttcaagagatatcaagtcaagttcaagagaagaagagagggaaaaaccgattaccgtgccaggattcggttgattaatcaggacaagaacaaatataacactccgaa

SEQ ID NO: 13791 - DNA, 155 bp, Glycine max
  Clone ID: 701067727H1
ggattctgaggccaccgcttatagcatttcggcgaaataaaatctccataatctagagagtgaatttaattgagtcgtcatcatcatcgcccatggatcagccgaagcgagtggttgtctgcggcggcggagtaatcggagtctgcaccgcctac

SEQ ID NO: 13792 - DNA, 155 bp, Glycine max
  Clone ID: 701067728H1
aagagagtgaataaatccagcattgttctgttctctgcaacattctccaatctcaaccatggtttctaagcttttactcatcactgtcttcgtttttgatttgattgcttttggacttgccgtggctgctgagcagagaagaagcaccgctagtg

SEQ ID NO: 13793 - DNA, 156 bp, Glycine max
  Clone ID: 701067729H1
ggcgaattcaaatggcaatcccacttttatggttatggagggaggtgtggcttgcctccttattttgatgctacttattgctatgctctgggttatggtgctggagccctccttcatagtgggaagactggattaatatcatcagttgccaattta

SEQ ID NO: 13794 - DNA, 158 bp, Glycine max
  Clone ID: 701067731H1
catctttctctcttctctctccacccaaaccctaactcccgaccctgttcccctctcgtatccgtcatgaaaggaggaaagtccaagaccgaatctaagagagccgatcccaaacttgctgtgaataagaagggagccgccaccaaggctaggaaacc

SEQ ID NO: 13795 - DNA, 162 bp, Glycine max
  Clone ID: 701067732H1
ggccggaagactgtgcacaatcacaaaccacgtgagaaacgggtgagttttagcccaatggaaaatgaagaaattcatgtagtaggagcttctcaataaggttactttcttccttgtaattagtatttaagtagaagcaaagtcgtgaccaaggcaaaaatg

SEQ ID NO: 13796 - DNA, 163 bp, Glycine max
  Clone ID: 701067733H1
cggctcgaggtgatctgcaagctacgatgggtaagggaacggggagtttcggtaagagaaggaacaagacccacaccctctgtgtgaggtgtggccgccgcagtttccacctccagaagagtcattgcgccgcgtgcgctttccccgctgcgcgcaccaggaa

SEQ ID NO: 13797 - DNA, 160 bp, Glycine max
  Clone ID: 701067734H1
ctttcgggtcatcattgagcttgctgtagtgaggtgttcaatctcgcaatttccttaaccaaattcatggcggaactgatagggcctcgcttgtacagctgctctaattgtaggaaccatgtctcactccatgatgatatcatttccaaggcttttcatg

SEQ ID NO: 13798 - DNA, 159 bp, Glycine max
  Clone ID: 701067735H1
aaattacatagcctcagtaatctgagagagaaacaaaaacaatgaaggtttccattgccaagttccactcccttcccctattttctttccttctcttggccttcaacacaaaacccctctttgcagcagaaccagagccagtggttgataagcaaggga

SEQ ID NO: 13799 - DNA, 159 bp, Glycine max
  Clone ID: 701067736H1
cttgatcagtccatggctttgtctttctttcgctgttgctgtttctctgagtcctcagaatccaaagagtttatatgccatggtgatgtttgcatgctcagagataggaagaagtacaaagccaaaaaatccaagagcaacaagcattagaaaagatgg

SEQ ID NO: 13800 - DNA, 158 bp, Glycine max
  Clone ID: 701067737H1
tcttaactcatcagtttcaagtcgcagatatgaacggtggcgcctttgattttatcgaagaaaactcaaacgggagcgactcggactcgaattctgatgacgcgccggagtactaccagccgatctccgccgtggaagacagtgggagttcggacgac

SEQ ID NO: 13801 - DNA, 158 bp, Glycine max
  Clone ID: 701067738H1
ctcttgtgtatacagacactgcttgtattcaattgacaacttcttgctgaagaaggaaatgagtggttgttttgggacaacacgtgccaatggccaaggatgaagcattagtttcgagatccaaaggagcaacaaaatttggtattgcaagcactaga

SEQ ID NO: 13802 - DNA, 151 bp, Glycine max
  Clone ID: 701067739H1
ttattctaatcgataggaatctggactaaaccataaaattgctttggaaatgatacattcacccaaatcaaacactgacccaaatcactaaaaaacagcactaaaagccgcattaaagaaaaaccatcgccactgcaaccttccacacaac

SEQ ID NO: 13803 - DNA, 155 bp, Glycine max
  Clone ID: 701067741H1
tatttccctacctctcccttcaagatgcagatcttcgtcaagaccctcaccggcaagaccatcacccttgaggtggaaagctctgacaccatcgacaacgtcaaggccaagatccaggacaaggaaggaatccccccggaccagcaacgtctcat

SEQ ID NO: 13804 - DNA, 105 bp, Glycine max
  unsure at all n locations
  Clone ID: 701067742H1
ctcatatatgatggctacgtcaatggtgaagcttatgattttgtatggggtcataggagtgaagttggangcaggtgtgtgtgtaaaagtagtgcatttgcaaga

SEQ ID NO: 13805 - DNA, 150 bp, Glycine max
  unsure at all n locations
  Clone ID: 701067748H1
cgtccttctcatcattctcatattattgtcgccacttcgacctcaatcatactcgcgccctcgctcttcccttcctggtggcgacaatgtccgnttctgcaaggaagaggctgatgagagactgcaagaggctgcaataagacccgcctg

SEQ ID NO: 13806 - DNA, 158 bp, Glycine max
  Clone ID: 701067749H1
tttaaggatcctccaaaacctcgtccaaggtttgtgttgtgttgggtgagattttattctaacatcgtttcatcaaatggcttttatgtctggagttcagcgtctgcttcgccgcactccacttgttcattcccactatgcttctattcgtctcagct

SEQ ID NO: 13807 - DNA, 157 bp, Glycine max
  Clone ID: 701067750H1
cgctctaatcctgttccattgaagcgaaggttttcacatagtactagcactgtggacttctttaatgtcaggttctagagtcaaactcttagtaattttctatgaagtgtacttgatgaatcttccattcttgagaactggatgtttcaattacatt

SEQ ID NO: 13808 - DNA, 156 bp, Glycine max
  Clone ID: 701067751H1
gaggaattcgttttctctgatcgggatctggaagggaagcgaatcgacatgggtttcttggtgacgacgctgatcttcgtagtgatcggaatcatcgcgtgcctctgcaccagaatttgctgcaacagaggaccttctaccaatctatttcacctt

SEQ ID NO: 13809 - DNA, 157 bp, Glycine max
  Clone ID: 701067752H1
gcgaaagagaagatggccaccgtacaagggccgctcgtgtgagagatcgtgaagaataacaacaccgtttcggtacagcacttcggaagggggacccagagcgtcgaattcagcagagagagcaacaatctctacaacctcaattcgtttaagtact

SEQ ID NO: 13810 - DNA, 151 bp, Glycine max
  Clone ID: 701067756H1
ctccatttgttcctctcttcccctcgtaactgcgcccacaactcttgatcgtaatggcaccgccaccaggaccttattctggcaccagcaccctagctttggtcgctcgagcttccgctttctccttcggccttgtttatggaagcattaa

SEQ ID NO: 13811 - DNA, 148 bp, Glycine max
  Clone ID: 701067763H1
ggttctatcaaaaaagaaactgtagattaagctgagagatgaattagtccaaagcaaattcaacgccgccgctgaacacccttcattttctattaataataataagtctctcaaaaatcttctggactctgccacgcccacagccaga

SEQ ID NO: 13812 - DNA, 56 bp, Glycine max
  Clone ID: 701067764H1
cgggtgagttataggccaatggagaatgacgaggttcacgtactaggagcttctca

SEQ ID NO: 13813 - DNA, 156 bp, Glycine max
  Clone ID: 701067765H1
tcctttggcatgcatgcccagtttttcttcttgtttgtttcctggatatcacagacatgcagtgtgtatcacttgctcttcgattcggatcaatgtaatcaagtcatcgttgatatcaaataaataatggcatgccagagaatggaataaattatc

SEQ ID NO: 13814 - DNA, 154 bp, Glycine max
  Clone ID: 701067769H1
gcttttcgctcaccggtgtgcagtcgaggccccgaagaagaagcgaaaatgccgtagcacaagacattcagaatcaagaagaagttggcgaagaagatgaggcagaacaggcctatcccctactggatccgcatgaggaccgacaacaccatca

SEQ ID NO: 13815 - DNA, 152 bp, Glycine max
  Clone ID: 701067770H1
aggttgtcgctaaggctggggacactgttgaggtatgtgatgggacactactggtaaatggtgacgctgaacaacggcaatttgtagtagagcctctagcttatgacatggatccaatggttgtgccagaaggatatgcgtttgtaatggga

SEQ ID NO: 13816 - DNA, 159 bp, Glycine max
  Clone ID: 701067772H1
aaaagctgcacacattgcccttcttgtccaggaatttgagatctaacattaacaacaactatctaagcactagcaagctagttagcaaggcaataatgaagttcttgttccagtgcccctgctgctcttgcttttgcttcatgaagccaaagcaaggga

SEQ ID NO: 13817 - DNA, 126 bp, Glycine max
  unsure at all n locations
  Clone ID: 701067773H1
actcttttttcatttgcagcatcaaaatgagtggtagcaacgatggtagcggcagctggagctctaggtttttgaaggtggctagtgcagctgncgctacagccgccgttgccggcggtttatatg

SEQ ID NO: 13818 - DNA, 149 bp, Glycine max
  Clone ID: 701067776H1
gcgcgagtcaccggagcggcgaagatagagtcagatcggaagcggaagaaggcgtcgacctcggcggcggagaaggagaaccggaataagcataagaagtcgaagatgtcgtcgtcgtcgtcgaagggtggtggcggtattgaggttag

SEQ ID NO: 13819 - DNA, 148 bp, Glycine max
  Clone ID: 701067779H1
acaacaatgaagctagtctgcaactcgtagtatcacgtacgagataaccatctgaagaatcggatctcattaggcggcatgatgacaacatatataaaactctcctggacaacttagctgtatatctgtctcgtaatgggcgaatcgc

SEQ ID NO: 13820 - DNA, 153 bp, Glycine max
  Clone ID: 701067780H1
attccttctcatcattctcatattattgtcgccacttcgacctcaatcaccctcgcgccctcgctcttcccttcctggtggcgacaatgtcgactcctgctaggaagaggctgatgagagacttcaagaggctgcaacaagacccgcctgcag

SEQ ID NO: 13821 - DNA, 153 bp, Glycine max
  Clone ID: 701067781H1
aacactcattaattgcaagaatggcacttcgttgcttggtgatgtccctttctgttctcttcactcttggtcttgcgagagaaagccatgccagagacgaagatttttggcatgctgtttggccaaacactcccattccaagttcattgcgag

SEQ ID NO: 13822 - DNA, 142 bp, Glycine max
  Clone ID: 701067782H1
ggccacatagtttcgctgcaactgcagcagcggctcgcagccagcgctctccagtgtggcagacgaaaggtttggcttgaccccaatgaagtcagcgaaatctccatggcaaattctcgccaaaacataaggaacctggcta

SEQ ID NO: 13823 - DNA, 162 bp, Glycine max
  Clone ID: 701067787H1
ggacaactgaggttgaaactgccaagactgaaaatgatgcaaagataatacttgggttgagccctggtgagctttcagtggtgaatcctaacaagaaaacctctgttggaaatgatgtgggataccgtttgattccagcaatcccagctcatcctcttctca

SEQ ID NO: 13824 - DNA, 148 bp, Glycine max
  Clone ID: 701067789H1
ggcaatccctaccagtgtgttttacttgaatccagaagagggaaagaatctagtcagatttactttctgcaaggatgaggaaactattaggtctgctgttgagaggatgaaagcaaagcttagaaaatgatctcgatgcattattaag

SEQ ID NO: 13825 - DNA, 147 bp, Glycine max
  Clone ID: 701067790H1
atatttttcacctgaaggccctctggtacaaaattcttgagcttagattcttacttcagaagccattctcgagctccaatagtttgccacaggaatcaatcaagtctttgttctgtgaaacagatgagacagttagagtagcatatt

SEQ ID NO: 13826 - DNA, 148 bp, Glycine max
  Clone ID: 701067792H1
cttccacggaaagaccaacgcacacttctccttagtctccgattccaaccttcaaatcaatgcacgcttcattggacacaggcctgaaggaagaagccgtgactacacatggatccaagcccttggaatcctcttcaactccaaaagc

SEQ ID NO: 13827 - DNA, 150 bp, Glycine max
  Clone ID: 701067793H1
cctcgagccgattcggctcgagccctctgctgccgtccctaatctcaaggctcccgccatctgcgatcggatttcatggacccaaagaaggacaaggctcccccaccttcatccaagcctgccaagtctggcggtggcaagcagaagaag

SEQ ID NO: 13828 - DNA, 139 bp, Glycine max
  Clone ID: 701067794H1
agtttgttgtgagctataagctagtttatcgtgaggagattatgaagttgtttgtcttctttgttgctgcagtagttttggtagcatggccatgccatggcgcaggctaccaaaggttcccactccgaatgaaaactgg

SEQ ID NO: 13829 - DNA, 150 bp, Glycine max
  Clone ID: 701067796H1
tagagttgttaccatttgctcccagtacagagcttaaccgagcttcacaaagatgaatcgggaaaagttgatgaagatggccggttcggttagaactgggggaaagggtaccatgagaagaaagaagaaggctgtccacaagacaacaac

SEQ ID NO: 13830 - DNA, 194 bp, Glycine max
  Clone ID: 701067801H1
ctaattctgcgtggtgagtgaaaatggcggtacccttgctctaccaagaggatcgtgaagaagcgcgtcaagaagtttatacgcccccagagtgatcgcaagatctccgtcaagccaagctggcgcagacccaagggtattgattctcgtgtcaggagaaagttcaaaggatgcacttgatgcccaacattggt

SEQ ID NO: 13831 - DNA, 153 bp, Glycine max
  Clone ID: 701067802H1
gaaagatgagtagttcatcaaggccggtgccgaggagagagagtccatggggagttactcgagagcatcattctgaaaccaaaggtgactgtcgcaatgctcgtgcataggaagccataccggaagccattgccgtgcacccaaatttccagt

SEQ ID NO: 13832 - DNA, 165 bp, Glycine max
  Clone ID: 701067806H1
cacctaacaacagtcgggatactgaggttggagatagatcgtcgtataaggaaggaaggaatactatgcttttttaatagaggattttttcttctgacctttgactggagttctttcttcctgtttcattgggcgtgtcatatgtaggagtacacatattacttt

SEQ ID NO: 13833 - DNA, 89 bp, Glycine max
  Clone ID: 701067808H1
ctcaattctcaaacttgttacagataccagacctttcttgaaacctttctccattatttctcagaagccacttctactctactcattcc

SEQ ID NO: 13834 - DNA, 183 bp, Glycine max
  Clone ID: 701067809H1
ctcgagcgctcgagccgaatcggctcgagtaaccttgttttcttcgtctttactcatctcttcaacagaagcgtaaaaacaaaaggcttgactagagaaagagagagagagagcttcgaatcgaaactcagaagtagaaagaaacacaaatcacaatcgctatggctagtacgaccgagcaat

SEQ ID NO: 13835 - DNA, 185 bp, Glycine max
  Clone ID: 701067810H1
cactgcatctcaacgaaacagagcgagctagagagagagagagagagaaagagaagagagagaagcagcgattcatcacaatgggtaaggttcacggatctctcgcacgtgcgggtaaagtgagaggacaaactcccaaagtggcgaagaagacaagaagaaaaagccaccggacgcgctcacaa

SEQ ID NO: 13836 - DNA, 184 bp, Glycine max
  Clone ID: 701067812H1
gcaagagcgagcagtttcagacacagagagagctcgttgggattggagggattgacgctgcgtctcttcctcttctctttcgatccatccctcattcctaatcctccaatccaaccacctcagcctcacactcacatatacacatatctgaacgcgcatcgtccctccttggcttcaaagcgca

SEQ ID NO: 13837 - DNA, 68 bp, Glycine max
  Clone ID: 701067815H1
tgttattgttccttcttatgctgtagtcatgggcacttgcccgttgttgtaatgctttattttttttt

SEQ ID NO: 13838 - DNA, 156 bp, Glycine max
  Clone ID: 701067817H1
ttcacaatctctgtttcagctttctctcttttctacaatggcttgcaccaccgtcgtgttgacgctagtcgccgcattgttggtaacctccgtcgtggctcagtctccggcgtcctcaccagctctgtctccaaagcgcaccccgtcgccacacct

SEQ ID NO: 13839 - DNA, 172 bp, Glycine max
  Clone ID: 701067825H1
ctctttctctctctctctctctctctcagaattttctcctctctccgattccttttattaattggagttttctcgctcctttttctttccctgaaaacatttcatcttcgtattgatgtcggaaaagggtcggccacttcccaaatttggtgaatgggtgtcactgatccag

SEQ ID NO: 13840 - DNA, 128 bp, Glycine max
  Clone ID: 701067826H1
gaaagttaacgtttgttcattaccatcacacaagggtcaaagtaatgtcttcagacaacgggggtgtatgtgtaattagattacatctcaataggtgttattataatttgttctttattttataatct

SEQ ID NO: 13841 - DNA, 116 bp, Glycine max
  Clone ID: 701067827H1
gtatctggttgctaattcgagtgctattagtctgtggtttggttggtttgtaaccccgctacttgggttatgtttgattgtatattatcctagagacataaaaattttaaattatc

SEQ ID NO: 13842 - DNA, 148 bp, Glycine max
  Clone ID: 701067839H1
ccatttggcaattaaaaagtcctctctatccagcgagaaccgcttgagagcagcagtgaggtagacaggaaatggtgagagttagcacagaggttctgcaaaaagcagccaaaaccctatccgacatcctcgtagccctctctctaag

SEQ ID NO: 13843 - DNA, 63 bp, Glycine max
  Clone ID: 701067840H1
gtgatggatctagatgagttggcaaaggtattcgtggagtaataatacagtacttttgatata

SEQ ID NO: 13844 - DNA, 165 bp, Glycine max
  Clone ID: 701067849H1
ggatttagagagagagaatggagaaaaaggaggaaaaggtggtggtgggcgtgccagtgccagtgtattacggtggagaaaatgaataccaaaggggaatcatccctcctaacgccgtgtttggagatccaaagggcatccccatccagaaaccatttacaggga

SEQ ID NO: 13845 - DNA, 160 bp, Glycine max
  Clone ID: 701067851H1
gtttacaattattgtagagtcatggcaacaagggtgcttttgatgatggccctcaccctctatatcttccccattgctacagcaaaattccatgtcaagggttccgtttattgtgatacctgccgtgctggattcgaaaccaatgcaccttttatattcg

SEQ ID NO: 13846 - DNA, 102 bp, Glycine max
  Clone ID: 701067855H1
gctctcagcatcctatttgtgggtaatttttttaatttctattaaaatattttgtgtatccctttaaaaaaaaaaagaaagaaacaaaaccaagggggggcc

SEQ ID NO: 13847 - DNA, 148 bp, Glycine max
  Clone ID: 701067856H1
gatcgagataactatcaacagtgtgatgaaaatgaaggtccttgttttcttcgttgctacaattttcgtagtctggcaatgccatgcgtacgatatgttccctctccgaatgaacactggctatggtgcccgactccggaggtgaaat

SEQ ID NO: 13848 - DNA, 151 bp, Glycine max
  Clone ID: 701067858H1
cagagaccatacgatgcccagagtgtggtaggataatggagattttcatcagttataaatgcaaccacagtgataatacttcaattgcttcaaactagaacacagtgaggcctgcttgtttgatgttatggatgaggagtgtgggattaag

SEQ ID NO: 13849 - DNA, 135 bp, Glycine max
  unsure at all n locations
  Clone ID: 701067860H1
aggagagacttattaagaagttgtggggtttgcgaggtcaatgtttaaacacgcgatgaaggtggagggtttggacgatgtagtcgacatcgtgggaaccggaagggacggtgtcaanacgtcaacatttcgacc

SEQ ID NO: 13850 - DNA, 152 bp, Glycine max
  Clone ID: 701067861H1
cagcagcatactattctatacataaataaccttcacatttacaatttgtcatacctaaggaactgttgggtcattacacctctaactgcatttatgtatattctgcactatacatggcacaagagagagggacaaaaattcctacaacagtg

SEQ ID NO: 13851 - DNA, 151 bp, Glycine max
  Clone ID: 701067862H1
cggaaacaaaggtcgctgctacgatttctggatggatttcagcgagtgcatgtctcgctgccgagagcccaaggactgtgctcttctccgcgaagactacctcgagtgcctccaccattccaaggagtttcaacgagaaaccgaatttaca

SEQ ID NO: 13852 - DNA, 176 bp, Glycine max
  Clone ID: 701067865H1
ctcagctcagccatattctatctccaagccgctaaatctctctcaaactcagtctctgtgtctctctctctttcacacccttcactttatcacctctctctgacagctaaaatgcaaggaggaatgagatcatttttgtcacatgggaatgtcattagaaatctgttctaccacgc

SEQ ID NO: 13853 - DNA, 154 bp, Glycine max
  Clone ID: 701067866H1
cttgactccgctctgccacggctgagaaaatagcgacgcggaaacacgcccgtcttcacgatcctgcgatccagcgcggcgtgtccagcgattccgctctccgacgagtctgcgcaggctcaagagtcgcgaggccagccccggtgaagaatcg

SEQ ID NO: 13854 - DNA, 149 bp, Glycine max
  Clone ID: 701067873H1
accgtctgtttgcaattccacgcttttcatttcctccaaattccgttccctcaggtttagccactccaaacagacgagaaatgggtcgtggggtcagtgctggtggtggtcagagttccttaggttatctctttgcagtggggtgcctg

SEQ ID NO: 13855 - DNA, 149 bp, Glycine max
  Clone ID: 701067874H1
cataaatcacatagctagtcctttaaagtaagagcggacccagaagcaaatggctcactttccagttgttgacatggggaagcttaacaccgaagagagacctgcagccatggagattataaaagatgcctgtggaactggggtttctt

SEQ ID NO: 13856 - DNA, 61 bp, Glycine max
  Clone ID: 701067878H1
gtctgatgtgtatgacgctaagcgtgcattgtacgacgctagcagggaaaggaaacttgct

SEQ ID NO: 13857 - DNA, 165 bp, Glycine max
  Clone ID: 701067881H1
aatggctctacacgacccgaaccggttccgcaaccgcaaacaaaccctctcctcgcgggaacgcttcctcggcgtcccatcatcccacgcgcctcgaatcgaaaactcttcctcctctgccaccgacgacgacgtcgtcgttttctccaacaacgacgcctaatc

SEQ ID NO: 13858 - DNA, 175 bp, Glycine max
  Clone ID: 701067883H1
aaggcttgtttctcaaaacattcacagtggccgcctaagcgctttcgccttcgccaggcttgagagcatgtgctgcttttatccttccttggatgtctgaggtcattatattatttctttgttgaccattttcgtctgtggttgattgatgctgtaagttatagttttttttctt

SEQ ID NO: 13859 - DNA, 177 bp, Glycine max
  Clone ID: 701067884H1
tgcgactgagagaagagaagagaattgtgatggggggaggacagggtcacggcacaacctacaaaggtgttaccattcatcagccaaatcgctggcacactatcaccggcaagggtttgtgcgcggtcatgtggttttgggtattctacagggcaaagcaagtggtcctgttgtatt

SEQ ID NO: 13860 - DNA, 169 bp, Glycine max
  Clone ID: 701067885H1
gaggggcatctggaacttcacaaatcctggggccgtgagccacaatgagattctcgagatgtacagggattacattgatccaagcttcaagtggactaacttcaatcttgaagagcaagccacggtgataattgctccacggagcaacaatgagtggatgcatccaaac

SEQ ID NO: 13861 - DNA, 183 bp, Glycine max
  Clone ID: 701067886H1
aactaatagggtcacgagggtttcatcctgcggcatcagacatgggaggaggcaatgggcaaaaggcaaagatggctcgcgagaagaacatcgagaagcagaaggccgcctcaaagggaagccagctggccaccaacaagaaagcaatgtcgatccagtgcaaggtgtcatgcaaacatttat

SEQ ID NO: 13862 - DNA, 183 bp, Glycine max
  Clone ID: 701067887H1
cgctagtgtgtctggggaaatttgcgttgtttttcgcggtacagctcacacacactgaacggtaagtatggcggacaaggctgttacaatccgaacccgaaagttcatgaccaacaggcctctttccaggaagcagtttgtcgttgatgttcttcatccagggagggcaatgtttccaaggct

SEQ ID NO: 13863 - DNA, 149 bp, Glycine max
  Clone ID: 701067888H1
gatcgagataactataaacagtgtgatgaaaatgaaggtccttgttttcttcgttgctacaattttcgtagcatggcaatgccatgcgtacgatatgttccctctccgaatgaacactggctatggtgcccgtatccggaggtgaaatg

SEQ ID NO: 13864 - DNA, 148 bp, Glycine max
  Clone ID: 701067889H1
gcaaaaggagcatgttgattatatagccagtacagggcaataatcatttgtgtatagcatgggtaaggacaccatcgctgacataataacctatataagaaatgctgacatccataaaaaaggaatggttcaatgccatttactaaca

SEQ ID NO: 13865 - DNA, 148 bp, Glycine max
  Clone ID: 701067890H1
gaaagaaactagaatggccactttagacgaacgcccttctgcgaaaaggtggcttcctcttgaagctaaccctgaagtcatgaaccagttcctttggggtcttggccttccactggacgaggcagactgctgtatgtgtttggcttag

SEQ ID NO: 13866 - DNA, 143 bp, Glycine max
  Clone ID: 701067891H1
ccccacaacccggcagtcaagttattagaatctgtcttgtgttgtgttgtgttgagcagagagagagagtcagggataagaagagaatagggttagggttagggctagggttagggtttgattgaggatgccgagaacaaggg

SEQ ID NO: 13867 - DNA, 310 bp, Glycine max
  unsure at all n locations
  Clone ID: 701067901H1
ccgaacccgaatttgaaaaatggatctacacgacccgaaccgcctccgcaaccgcaaacaaatcctntacttgggggaacggtttcttcggcgtcccatcatcccacgcgcctgcaatcgtcaactcttcctcctccgccaccgacgacgacgtcgtcgttttctccaacaacgacgacctaatcgaagacgatgtcgttttctccaacaatgacgactccaacgaaccctcttcttcttctcaaatccctaatcgccaccacaaccacaataaccaccatcaagccttcgcgttcggtccctccgacgc

SEQ ID NO: 13868 - DNA, 308 bp, Glycine max
  Clone ID: 701067902H1
cttcttcgtgccaagggacaaaaagcacggaagcggaggaaggccaaaccggacaactggaaaaagggtcttgaaaagcaaacggttcagaccggaaaatagtgaccttatctgatccaaagcgcataattgggttaaggaagacactggttttctatcagggaagagctcctaggggatgcaagaccgattgggtcatgaatgagtaccgtttacctgacaattgcaaactacctaaggaaatcgtgttatgcaagatatatcgaaaggcaacttcgttgaaagtgctggagcaaagggcagcacta

SEQ ID NO: 13869 - DNA, 306 bp, Glycine max
  Clone ID: 701067904H1
cttaggtcttccgaattcgaagttaatttgcaagatggctaaggaaaaggctcagatcaacattgatggtggttggccaggtggaccctgaggaggcaaccaccattaacgagctgaagaagcctgttgtggagaaagaagctccagggcatgccatatgagggcatgcacgtacggcctcggaggggaaccagaaaattatgttaacaaaataatctggaaccctaatgtatcagtgtcatcatcagtgtgtagtttaagctagctttgctatggttacgttctttgagatgagagtcttgatga

SEQ ID NO: 13870 - DNA, 299 bp, Glycine max
  Clone ID: 701067905H1
aataactagatacagtatgatgaaaatgaaggtcattgtcttcttcgttgatacaatttttcgtaacattggcatggccatccgaacgatatgttccctctccgaatgaacactggctatggtgcccgtactccggaggtgaaatgcgcaagttggaggcttgctgtggaagcacacaacatctttggctttgagaccattcctgaagagtgcgttgaagcaacaaaggaatacatccatggcgaacaatatagatcagactccaaaacagttaaccaacaagcttacttttatgccag

SEQ ID NO: 13871 - DNA, 301 bp, Glycine max
  Clone ID: 701067909H1
ctgattccagaaacatcttcaatcaatctcccctcgtctcctctcaatcaagtttgaagctgagaaataatcctgggccggtggtgcgaatttcgtgcagagggttctctcttacgtggtgaatgaagtggttgtcaatggtcttgccaacagccctgcatttcagaggtttgcagtgaggacatcaaaaagaattggagatatttctaacaaagctgttcagaagaggcaggagctagctgagcagatcaaggacatctcaaaaaatatggagtcattcaagaaccagtaattttggtat

SEQ ID NO: 13872 - DNA, 299 bp, Glycine max
  Clone ID: 701067910H1
cttaagcttgctactgagtttccacactgcataccttacgtcttccgaattcgaagttaatttgcaagatgggtaaaggaaaaggctcagatcaacattgtggtggttggtcatgtggaccctgaggaggcaaccaccattaacgagctgaagaagcctgttgtggagaaagaagctccagggcatgccatatgagggcatgcacgtacgcgcctcggaggggaaccagaaaattatgttaacaaaataatctggaaccctaatgtatcagtgtcatcatcagtgtgtagtttaagcta

SEQ ID NO: 13873 - DNA, 287 bp, Glycine max
  unsure at all n locations
  Clone ID: 701067915H1
tgttcgtgcgattcttcgtccctgctcgaatgcgtctgctactgcatcaagtctcaagacaacacggcttatcgttactntaatttatcatttaatcgtacaaaaacgacttaacgtgcggggggagtacaaaaatatagtggaagataatcatcgatcacgtacagaaaattatagcgatgcagcgtgtattggatgtacgatcttcacttcagtttttacttaaatttaagcaaaactctttaaaattggtttccttaatccaggtaatgtacctttcacagaaa

SEQ ID NO: 13874 - DNA, 294 bp, Glycine max
  Clone ID: 701067916H1
ctcgagccgacgcgtgaacaagcctcaggtaagtcaaaaccatggttaagcataacaatgctatccaaacggacacttccgtaaagaatgggagaactatgtgaagacttggttcaatcagccagcacggaagacaaggagacgattggctcgtcagaagaaagctgtgaagatattccccagacctacggctggacctctcaggcccattgtacatggtcaaactttgaaatacaacatgaaagtgagaggtggaaggggattttctcttgaagaactcaaggcagcagggat

SEQ ID NO: 13875 - DNA, 309 bp, Glycine max
  Clone ID: 701067917H1
cttccctcaaccacttctcagtgtcccgaaaatcttctctgcttcagaccagagcttctttcatagggactcatcctcaataagatgccaatgaggtgttcaaagatttgaaggaaaagtgggatgctcttgaaaacaagtccacagtacttttttatggtggtggggctttagttgctgtttggctatcgtcgattcttgtcgatcgccatcaactctgttcccttgcttccaaagattatggagttggtggggctagggtacactggatggtttgtctaccgataccttctgtttaagtctagcagg

SEQ ID NO: 13876 - DNA, 302 bp, Glycine max
  Clone ID: 701067925H1
atgaagttcaacatcgcgaatcccaccactggatgccagaagaagctcgagatcgacgacgatctgaaactgcgaggaattttgggacaagaggatctcacaggaggtcatcggagatgcactcggtgaggaatttaagggctatgtcttcaaaattaccggaggttgtgcacaaacaaggatttccaatgaagcagggagtgctgactcctggtcgtgttagacttttgcttcacaggggaactccttgcttccgtggatatggaaggcgtaatggagagcgtaggagaaagtctgttcgt

SEQ ID NO: 13877 - DNA, 297 bp, Glycine max
  Clone ID: 701067926H1
aagttattgtgagcaaagaaagatagtgagtgaagtaactgaagagaagaaaaaatgccgtgcctcaatcttcagaccaacgtgtccctcgaaggcgtcgacacctcttccatcctcgccgaagccacctcctccgtcgccagcataatcggcaaacccgaagcctatgtgatgattgtactgaaaggatcagtacccatagcttttggtgggaatgagcagccagcagcttatggagaattggtttccattggtggtcttaaccctagtgtaaacaaggaacttagtgctgcaatt

SEQ ID NO: 13878 - DNA, 291 bp, Glycine max
  Clone ID: 701067928H1
ccctcagccgaatcggctcacggctcgaggttcaaagctgagcaaataactgctatcatgcatgactttaacgagctggatcacttgctccaactggattgtttctcgctgccaccaaatacatggtcatccagggcgagcctggtgccgtcattcgaggcaagaagggtcctggtggtgttactgtgaagaagaccggtgcggccttgatcattggcatttatgacgaaccaatggctccgggtcagtgcaacatggtagtggaaaggcttggtgattatctcattgaac

SEQ ID NO: 13879 - DNA, 295 bp, Glycine max
  Clone ID: 701067930H1
tcgccatgagcgaatcggatcgagcggctcgaggttcaaagctgagcaaataactgctatcatcaatgacttaacggagctcgataatttgctcaaactggattgtttctcgctgccaccaaatacatggtcatccagggcgagcctggtgccgtcattcgaggcaagaagggtcctggtggtgttactgtgaagaagaccggtgcggccttgatcattggcatttatgacgaaccaatggctccgggtcagtgcaacatggtagtggaaaggcttggtgattatctcattgaac

SEQ ID NO: 13880 - DNA, 293 bp, Glycine max
  Clone ID: 701067932H1
ctaagatccgccttatctgaattgtaaaaatgtcgctcggagaaactgcttgttcatacgcagctctcatccttcatgaagatggaatcagtgtaactgccgacaagatcagcaccttgttggaaactgcaaaggttcaagtagatacctattggccaaccttatttgctaaacttgctgagaagaaaaatcttggcgatttgatagccaatgcagcaggcggtggtgcaccagttgctgttgcagctgcccctgttgctgcctcaggtggtggtggtgctgtgctgccgccc

SEQ ID NO: 13881 - DNA, 307 bp, Glycine max
  Clone ID: 701067933H1
cgtgagctataagcgcgtttatcgtgaggagcatatgaagttgtttgccctctttgttggctgcagtaagtttgcgatcaatgcccaggccatggcgcaggctaccaaaggtcacctctccgattgtcaactggctatggtgagcgttcttcggaggtaaaatgcgcaagtcttaggcttgctgtggaagcacacaacatccgagccattaaaaccattcctgaagagtgcgttgaaccaacaacggactacattaatggcgaacaatttagatcagactctaaaacagttaaccaacaagctttct

SEQ ID NO: 13882 - DNA, 273 bp, Glycine max
  Clone ID: 701067938H1
cttcacctcacaacatcgagcctactgagctggagatagaggctgtataatgcaagactgcatatcatgctgtttcattacctaattttatccttcgacatttgactggagtcctttcttcctgtttcattgggcgtgtcatatgtaggagtatcacatattactttcctcggctatagagagccaaattataccgtatccttaatcttgaatgttttccggcttcaaccattaatcctctctgcaagagtctattttctcatcttggtgaaa

SEQ ID NO: 13883 - DNA, 302 bp, Glycine max
  unsure at all n locations
  Clone ID: 701067940H1
acgatttgcaagctgtagtgtttgacattgttatcacatttgggttggtttacactgtgtatgcaactgccataggacccaaagaagtgggtcattgcggtatcaatcgnacccattgctattgggttcgttgtgggtgccaacatcttagcagcaggcccattcagcggcggttcaatgaacccagctcgctcattcggcccagctgtggtcagtggagacttggctgctaactggatctactgggttggcccattgattggaggaggtttggctggcttgatttatggagacgtcttcat

SEQ ID NO: 13884 - DNA, 299 bp, Glycine max
  Clone ID: 701067941H1
agacaatgaaagtccttgtcttctttgttgctatagttctagcagcatggcattgccatggctcagaccatgaacaatgaccatggccacacctaccaaattttccctctgagaatgaaaactggccatggtggccactacattccggaggtatcatgccaaagttggaggcttggtgtggaagcacacaacgtcattgactggaaaaccgttcctcaagattgcgagggatatattgggaactacatgcttggcgaacaatatagatcagactccaaaatagttaaccaacaagctta

SEQ ID NO: 13885 - DNA, 286 bp, Glycine max
  Clone ID: 701067947H1
tgagtttccacactgcataccttcagagtcttccgaattcgaagttaatttgcaagatggctaaggaaaatgctcagatcaccattgtggtaggtggtcatgtggaccctgaggaggaaaccaccattaacgagctgaagaagcctgttgtggagaaagaagctccagggaatgccatatgagggcatgcacgtacggcctcggaggggaaccagaaaattatgttaacaaaataatctggaacccattgtataagtgtcatcatcagtgtggaagtttaagctag

SEQ ID NO: 13886 - DNA, 305 bp, Glycine max
  Clone ID: 701067949H1
ctcgagccatcagctacagttcttatgagatgttggcgggtcacgtgtggagaagtgtatgccaaagcagagcaacttcctgttgatcaagaaaccaaattgtacattgcaactgatggaaggtcaaggttgcaacctcctcccccaccgggttactttggcaatgtgatattcacaaccacacctatagctgtggcaggtgatctcatgtcaaaaccaacatggtatgctgcaagcagaatccacaatgcattgttacgaatggacaacgattatttaaggtcagctcttgactatctagagct

SEQ ID NO: 13887 - DNA, 300 bp, Glycine max
  Clone ID: 701067957H1
caagtgttaccaaatatgatgatttggaattcaagtcaagcattatcaagaacgatgatttctgaaatcgagaccaaagtgttaccaagcatgatgattctgaactcaagtcaagcgtcaccaagaacaatgattttgaaccgagaccaagtgttacaaagtatgataactttgaacccagaccaagtgttaccaaatatgatgattttgaactcaggtcaagcgttaccgagaatgatgattttgaaccgagaccaaatattagtaagtatgatgactttgaactcaggtcaagcgtta

SEQ ID NO: 13888 - DNA, 128 bp, Glycine max
  Clone ID: 701067958H1
cttcatttacggctatgagcaacttctgtctaggactaagctctttctggtaaaataaagagttccctgaacaaaaggagttctgtgtgaccttataaatacggtgtatcttattcatatgtaatctg

SEQ ID NO: 13889 - DNA, 302 bp, Glycine max
  Clone ID: 701067965H1
gatagacacaaaattctcatcttcaagtcatggccatctttaaggcgctccttgcttcaatcctcatttctctgggtcatggtgaatctggtggaatcagatacaatgtatcaggtaatcaagaacacggtagagggatcaagtcctagcccttccccgccaacgatcgattgtgatgttgaatgtaatcggaggtgtcaattatcatcaagaccaaatttgtgcaagagagcatgtgggacgtgctgtcagcggtgcaattgtgtgccttcgggtacctatggtcattatgaagagtgttc

SEQ ID NO: 13890 - DNA, 298 bp, Glycine max
  Clone ID: 701067972H1
caacttcgttggcctcagtcaagaccagaccaacggcaacgtcctcgtcctcgttaagattgacggtaagggtttgatggaaagttggttccttcgtctctgctcactacaacctcaatgtaaggtgccctgctttcataacctttggcccccaaagcaacgggattgcccttggcaataacgccgttaagtatcaattggttcaacgctgcaccgtcggggtttgatgtcaacgccttccaagatatattgctctgcctcttggtatatttagtgtctatttatatacggtctttct

SEQ ID NO: 13891 - DNA, 286 bp, Glycine max
  Clone ID: 701067973H1
gtgattctcatagccaaaggagagacctatgaagaagttgtggggttggcgaaggcaatggttaacacgcgacgaaggtggagggtttggacgatgtggtggacatcgtgggaaccggaggggacggtgccaacacggtcaacatttcgaccggtgcttcgattctcaccgcggcttgcggtgacagagttgcaaagcaaaggagccgttccagtacatctgcgtgtgggactgccgatgtgttggaagctttgggagtcgtcatcgacttaggtccacagggggt

SEQ ID NO: 13892 - DNA, 291 bp, Glycine max
  Clone ID: 701067978H1
cgaggagacaaaagaggcattccgggttttcgacaaggatcagaatgggttcatctctgctgctgagctccgtcatgtggatgaccaacctcggggagaaactcacccgatgaagaggtcgatgagatgattcgtgaggctgatgttgatggagatggccaaataaactacgaggagttcgttaaggtgatgatggccaagtgagtgatcatcacattatggccacaagaacctaaatgaagaagtgttgattaacaggacatgaccaaaaacacagaggtacggggaagg

SEQ ID NO: 13893 - DNA, 288 bp, Glycine max
  Clone ID: 701067979H1
ccacactgaataccttaagaatttcgaagtcgaagttaatttgcaagatggctaaggaataggctcagatcaaaattgcggtggttgtgccagtggagccggaggaggcaaccaccattaacgagctgaagaagcctgtggtggagaaagaagttccagggcatgccatatgagggcatgaacgtacggcctcggaggggaaccagaaaattatgttaacaaaataatcgggaaccctaatgtatcagtgtcatcatcagtgggtagtttaagctagctttgctatgg

SEQ ID NO: 13894 - DNA, 229 bp, Glycine max
  Clone ID: 701067980H1
aactaataattctggtgtctcgtgggctatgaagatgttcgtgttcagatatatgaacataatttctgttatattgtgtagagggtcggtattactgactttccttcagcatgataggcgaaactagttttttccacataaatttctccggggaaaagtacgtttttgataccatgaaaaaaaaaaaaaaagggcggccgccgacaattaacctcttcacccggggatt

SEQ ID NO: 13895 - DNA, 301 bp, Glycine max
  Clone ID: 701067981H1
cggctcgatctcgagccgaatcggctcgaggagtttgttgtgagctataagctactttatcggtacgaaacctttgaagtggttggtttcctttgttgctgcagtagttttggtagcattgccatgccatggcgcaggctaccaaaggttccctctccgaatgacaactggctatggtgagcgttcttcggaggtaaaatgcgcaagtcttaggcttgctgtggaagcacacaacatccgagcccttaaaaccattcctgaagagtgcgttgaaccaacataggactacattaatggcgac

SEQ ID NO: 13896 - DNA, 116 bp, Glycine max
  Clone ID: 701067983H1
gtgggatgagaaggttttatgtaataagatggcagtgaaatctgtgcccgattcagtaagtaattttaccaaaattggaaacccagtaataatcaataaaatgattcttttctgta

SEQ ID NO: 13897 - DNA, 293 bp, Glycine max
  Clone ID: 701067989H1
aaacaaggcaccagtttcggtcctccattcacctgttgtgaagtttcctacatacaatcaaggaaagagtgaaatcctctatccaaacaacttgcttaatgtgaaagcaaacacaaagggttgggttagtactgaaaagttgaaacagagaaacaaggtcaacgattcactcaatgagcagaatcaaggtcctagaacagctaatgcaaaaggtgcattaatgtctggaggtaattctgtgagaggctcagccctagttgggagtggaaatgttaccaacaaaatcagggcag

SEQ ID NO: 13898 - DNA, 112 bp, Glycine max
  Clone ID: 701067990H1
tgttttggtgttcacacgtgtatgtagattaccttgatcatttcattgtacatctaataattgacagcctaaaccagttggccatcctttttaaaaaaaaagaaaacaaaaa

SEQ ID NO: 13899 - DNA, 258 bp, Glycine max
  unsure at all n locations
  Clone ID: 701067991H1
atccaagttcaaagatgaagatgatccacgttctgttcctctttgctcttgtcccggtcacttgccatgcttctgtcaatgatttctgtgtagaagacctaaaaggtccagatagcccttnaggctatcagtgcaagccacctaacacagtcacagtggacgactttgtgttctctggctttgtagctggacagcctccaaacactttcaatgctccattaacctcagcatttgttactgattttccaggtgtgaatg

SEQ ID NO: 13900 - DNA, 251 bp, Glycine max
  Clone ID: 701068001H2
ccctggttcccatcatggacgaattagaagaaaccctactcacccaaatcgactgggaatcgttcctcgacgacatacctgaacttaacgtcgatgattttttgcaggacgacaacgccgttcctgttgttaccgacaatcattcctccccgaacgacgaccccgttttgtccgagatcgagaacatgctcatgacgcaggccgaaaacgacgctctcgttttgcccgagacgccgtctcggagccgggta

SEQ ID NO: 13901 - DNA, 254 bp, Glycine max
  Clone ID: 701068002H2
attatcgttatcttgctgaatttaagtcaggcaatgagaagaaggaagctgctgatcagtctatgaaagcatatgagtctgctaccgctgcagcagaggctgatttacctcccacacatcctatccgactgggtctagctttaaatttctctgttttctattatgagatcttgaactcccctgaaagagcctgtcatcttgcgaagcaagcttttgatgaagctattaccgagcttgacaccttgaatgaggag

SEQ ID NO: 13902 - DNA, 248 bp, Glycine max
  Clone ID: 701068003H2
agaatggctcccaagggtttaacctttctggctgtgttaatatgcgtttcagcactgtcactgagtccttctgttgcgggggaagggcaaaataatggccttgttatgaacttctacaaggaatcatgccctcaggctgaagacatcatcacagaacaagtcaagcttctctacaagcgccacaagaacactgctttctcctggctcaggaacatcttccatgactgtgctgttcagagttgtgatgc

SEQ ID NO: 13903 - DNA, 251 bp, Glycine max
  Clone ID: 701068004H2
attgcagaggatattacagatgcacatatagaaatgtacaaggatgtctggccacaaagcaggtgcaaaagtcagatgaagacccaatgatatgtgaaataacctacaaaggaagacacacatgcacccaagcaagtcacttaaacaaaacagtgatacccccatcaaagacaaaggtgaacttgctgggagaaaataagcaccaaacccatcaaattaagaatcaaccacggcaagagaaaatagaacaa

SEQ ID NO: 13904 - DNA, 248 bp, Glycine max
  Clone ID: 701068005H2
gaggttttgatgcaacgctgtcactgagaaaggatctctatctacgaaggagcggaataaaacccttctctctgtgattaagagaatggcttcagatcggaaacttcacacttttgaggaggtggcaaagcacaaccagaccaaggattgctggctcatcatttctggcaaggtgtatgatgtcacccctttcatggaggatcatcccggaggtgatgaggttttgttatctgcaacagggaaagatg

SEQ ID NO: 13905 - DNA, 244 bp, Glycine max
  Clone ID: 701068006H2
atcatctcccccatgtgaacgttacattacaccttagtttggttttgtagcattattatccccaacccatcaaaagcaacaatcattgaattaattgcaccaaatattgttttgctgtaatcaatactccaatggggaatgccttggggggaaagaaaaccacaaaggtgatgaagattgatggggaaaccttcaagcttaaaaccccaataaaagtttgtgatgtgctaaaagaccaccctgg

SEQ ID NO: 13906 - DNA, 249 bp, Glycine max
  Clone ID: 701068008H2
cgcgttctatatattattgaattgacaatgaggcctgctcttgctttgcttcctcttctatttgctttcttgttagctgccactacggaatcaagaaaagatccagggtcatatcggaaaatgatcatgaaagatcaggaaatgccagaaggacttcaaggtcttgtttcatttcaatctgaaaataaccctaagactcaagagcagcttggtaaaggttccaaaaaccattgtgaagagtctctagtt

SEQ ID NO: 13907 - DNA, 253 bp, Glycine max
  Clone ID: 701068009H2
agtcatctcaagttcgaatctttggaaaaatttctaaactcggacagatattttcacttgagtgaaccgtttgacaaataaaattacggtatctgagaaatcacagagctatggttgcagttctacttctcaatccttatgggaatgaagggtttgcgaagcttgaggtctggaaactaggagttgtcaactctttggatgcattgaaactgcaggaaaaactggccttggatagaaaacttcataggagatg

SEQ ID NO: 13908 - DNA, 251 bp, Glycine max
  Clone ID: 701068010H2
catggctctgttattcaaggatccgtcgaagatttcagcgtatcgagatagaaggttccccggaacgcaagacgagtttgagcacgcgcttgtgacctcaaccaccgtttacgtggggaacatgtctttttacacgacggaggagcaagtttacgagctcttctcgcgtactggggaaataaaaaagatcatcatgggcttggacaagaacaccaaaacgccctgcggcttctgtttcgttttatattatt

SEQ ID NO: 13909 - DNA, 251 bp, Glycine max
  Clone ID: 701068011H2
ctcactgatctccattcccattccatggcttccactgaatcatcacctttcaagaaaattcagattcaaagggattacactacatttgacgcatatgtggttggaaaagaggatgctcctggaattgttgtgattcaggagtggtggggtgtggattacgaaattaagaaccatgccgtgaagatttctcagcttggtagtgggtttaaagctcttatcccagatttatacagaggaaaggttggtctgga

SEQ ID NO: 13910 - DNA, 253 bp, Glycine max
  Clone ID: 701068012H2
acaggtcgagctcgagccgtttgcaggtatttgtgagtgtgtgagacatagagcgagcagtatcagacacaccgagatgggtttgggattggagggattgacgctgcgtctcttcctcttctctttcgatccatccctcattcctaatcctccaattcaaccatctcagcctcacactcacatatacacatatctgaacgcgtatcgtccctcctattgcttcaatgcgcatcctcaaggagctcaatgactt

SEQ ID NO: 13911 - DNA, 234 bp, Glycine max
  Clone ID: 701068013H2
cagatcgagataactaaaaacagtgtgatgaaaatgaaggtacttgatatcatcgttgcaacaattttggtagcatggcaatgccatgcgtacgatatgtaccctcaccgaatgaacacaggctatggtgaaagtactcctaatgagaaatgcgaaagtaggaggcttgctgaggaagcacacaacatctttggatttgagacaattcctgaagagtgcgttgaagcaataaag

SEQ ID NO: 13912 - DNA, 252 bp, Glycine max
  Clone ID: 701068014H2
ctccgttttctttctttcttcttcttcttctcttcctcttcaagactgcgacgacgatccaagtgatatacactcgatgcgatggaacttgtagctgaatccgagcgaactctgtacccatacgtgactggatcctctgtagtcgctatcaaatacaaagatgggattctaatggccgctgacatgggaggttcgtatggatctaccctgcggtataagagtgttgagcgtatcaagcctattggaaagcat

SEQ ID NO: 13913 - DNA, 251 bp, Glycine max
  Clone ID: 701068015H2
ctttgaggaggaccttgatgcaatgcttccaaagtgtgatgtaattgttatcaatatgcctcttactgaacagacaagaggattgtttgacaaaaacagaattgctaagtgcaagaaaggtgtggtgattgttaacaatgctcgaggggcaattatggacacccaagcaattgctgatgcttgctctagtggccacgttgcaggctatggtggtgatgtttggcccatacaaccagctccaaaggaccatc

SEQ ID NO: 13914 - DNA, 92 bp, Glycine max
  Clone ID: 701068019H2
cctgttgttaatgaagttgtataggatgttttgacataataaggcatgacatgaactgccacaaaatcttggtacataaatacccatgtaaa

SEQ ID NO: 13915 - DNA, 121 bp, Glycine max
  Clone ID: 701068023H2
caaatcaaagccatggccacctccatcttctctattgttatctccgtctccctagccttctttttggtgctacttaccaaggcacactcgaccgataccgtttctttcaccttcaacaagt

SEQ ID NO: 13916 - DNA, 251 bp, Glycine max
  Clone ID: 701068027H2
gtttaacgaacctcgtgtggtggctgctcttggctatgataatggtttctttgcccctggaagatgctcaacagaatatgggaattgtactgctggcaactcaggcactgagccttacattgttgcccacaatttgatattgtcgcatgcagcagctgttcaaagataccgagcgaagtaccaagaaaagcaaaagggaaggattgggatcctcttgtattttgtttggtatgagcctcttacaagatcaa

SEQ ID NO: 13917 - DNA, 244 bp, Glycine max
  Clone ID: 701068039H2
caacagtgacgcctttgtcacagtctgtaaagggtcctaatattaaagattctttgcaaaaggatgcaaaagtcaggaagatgggtgtgacaccctcaggtcagaacaactacttgtttagtgacttgcttggctagtctgattgaaaggacaattctaaatcatgatgtttgaggatagatataccttgcaacttaccactcgttggagtttcagaaacagttgggtatcatctgatatatgc

SEQ ID NO: 13918 - DNA, 250 bp, Glycine max
  Clone ID: 701068049H2
ctagcatacagtgcattgtagtcggtgtaatcaaactggacattacaagataacttgtaaagctgagatgattaatagtatagagcagttttagttgtctgattatgtactaagttgtttaccaaagatctagtttagttttaacatctagaggccctatgtttatgacattcctatgatgcagatcatgtagaagttagatatacatcactgtactaaatcagtagtgtaatagaatgaagtttacaac

SEQ ID NO: 13919 - DNA, 249 bp, Glycine max
  Clone ID: 701068050H2
gaattagggttttccaattcacagagcaacacaacgaaccaattatggcgcacctcagccgcagtcgcagccgcagcacgggcaagcagcgctggagcaggtgcagtgcttcggtcgcaagaagaccgccgtggccgtgacctactgcaagcgcgggcgcggtctcatcaagatcaacggctgccccattgagctcgtggagccggagatcctccgcttcaaggccttcgagcctatcccctgttgggt

SEQ ID NO: 13920 - DNA, 234 bp, Glycine max
  Clone ID: 701068063H2
tttttgtaaatgtcagcgtgagggcctggaatatctacatcaattagtgaaggacggtaaacttaagtctgttatagactccaagtttcctttgagcaaagctgaagatgcttgggctaagagcattgatgggcatgctaccggaaaaatcattgtggagacataggtacagtttgcttggaattgttgtatttctagtttctacatatctggacaaggtttgtgtaagctcat

SEQ ID NO: 13921 - DNA, 250 bp, Glycine max
  Clone ID: 701068065H2
gcgaccaggaaacgtgtacccattggcacaccgactcctctgagctggctctttatctatccggagggactttataagctcatgacatacataagggacaactacaataatccaccggtgtacattaccgaaaatggcgttgcggaatcaaagaatgactcacttgcaatcaatgaagcccgaaaggatggtattcgaattagataccacgatggccatctcagatccctgcttcatgcgatcaaagata

SEQ ID NO: 13922 - DNA, 248 bp, Glycine max
  Clone ID: 701068073H2
aaaaacctctctcagagtttgctcacccctactcttcttccagtctctatctcaatctccatcaaatttaactatggctactgaagaggttttggttgatgaaatcacttaccctaccaagatcactactaccaagcccctatctttgcttggccatggaatcaccgacatggacattcacttcatccatgtgaaattctattcaatcggggtttatttggagccagaagtagtaggccactggacca

SEQ ID NO: 13923 - DNA, 211 bp, Glycine max
  Clone ID: 701068075H2
ggagtcctcaaagatctatgcttaactcttactctgcatgatatttcactcttccgccaatcccattctctactagtggctactgtggcaaacaccccaaaaagcacaagcctggtaaaacaccaaagacacccaaaacacccgttgttaagccaccagtcaccatccctcccattaatgttcctcccgttgttcttccacacatcgtgcg

SEQ ID NO: 13924 - DNA, 89 bp, Glycine max
  Clone ID: 701068079H2
attttacaaaacgagatcagagtacatacattagaggatattctgatcctctaatgtatgtactctgttctcgctttgtaaaatatctt

SEQ ID NO: 13925 - DNA, 248 bp, Glycine max
  Clone ID: 701068080H2
ggacgccaagttcggaagcctcttcgaaaccatcggaaacttcttcaccggcggtgagcagatcccgtggtgcgaccgtgacgtcatcgctggctgtgagagagacagctgcagaggctgctaatcgtgactctgaggagcggaagaatgagagtataatgaggttgtcatgggctcttgttcattcaaggcaaaaggaagatattcagcgtgggatagccatgcttgaaacttccttgggcaatgat

SEQ ID NO: 13926 - DNA, 242 bp, Glycine max
  unsure at all n locations
  Clone ID: 701068086H2
cagcgaatttacttcgttgttcactatctttctactccatactttcacctcatacctaccttcagncancgctgctattgtgtacgatacggatggtaatattcttcaacaagggtcgcacatattttgtgttggcagctacaagaggaaacggcggtggaatagaatttgccgcaactggaaacgacacttgctctctaactgtcgtgcaatctcccagtggcgactctattgggtttcca

SEQ ID NO: 13927 - DNA, 103 bp, Glycine max
  Clone ID: 701068087H2
ggctggcagcttgttgtgagtaagagaaaaggcttcctgcaccgagcacaccaacttgatacctctgattctatctttgcttagaattccacacaacatacgt

SEQ ID NO: 13928 - DNA, 246 bp, Glycine max
  Clone ID: 701068089H2
atgaacttgagatggatggaagcggtgttgccgctgggaatcatagctggaatgctctgcgtcatgggaaacgctcagtattacattcacagagctgcacatggcagacctaagcacatcggaaacgatatgtgggatgtggcgatggagcgaagggacaagaagcttatcgagcaagcctctccctccaattaacatcgttgttttgccgatgtcattgtgaagaaaataaactgctcacctgga

SEQ ID NO: 13929 - DNA, 242 bp, Glycine max
  Clone ID: 701068092H2
tagggtacttgctgcccgtcgacgaatggatgggatcatcactactgtggcattaatgctagacagcgggttaccttgcttcagcaggggtgacccgattggcaatcttcggaagagatttcatccggagatgagtgagcgtgaagcagccaatttcatgacacatgtttgtaaagatgcttataataagtggaccactgctggctatgacttgatacagtatctgcagcaaggcatcgaga

SEQ ID NO: 13930 - DNA, 245 bp, Glycine max
  Clone ID: 701068094H2
gcgagagacagagacaacgaccccagacgcttgcactctttctttggcccacggcgtcgttttctctacgctttacccattcattcattcattctcatgttcggggcatttcattctgattcactatggccaatggtccagcaccgttttctgagattgggaaaagggcaaaagaccttttatacaaggattacaacttcgatcacaagtttagcctctcaattccaaactccactggattgggg

SEQ ID NO: 13931 - DNA, 266 bp, Glycine max
  Clone ID: 701068102H1
ggtatgctgatatgcactattcaaataggagcattagctatgtttgttaatgtcactttatgttatgtgggtaagtcacctaagacactccacgtacctacttgttgtctcttacgcggctttaataaatcttctgcccttgttccatatttaaaaaaaaaaaaacaagaagaatagaaaacggaataaagagggagagacatcttaatctagcacatgaggggagacccaattcgggcaggggagattggggtgtttaatgtcga

SEQ ID NO: 13932 - DNA, 266 bp, Glycine max
  Clone ID: 701068103H1
caggcagaaagcaagctcatcctagagttttaaaaatggcagcagcctcctccatggctctctcttccccatccttggctggcaaggccgtgaagctgggcccatcagcccccgaagtcgggagggtcagcatgaggaagaccgtcaccaagcaggcctcctccggaagcccatggtacggcccagaccgcgtcaagtacttgggcccattctctggcgagcccccgtcctacctcactggcgagttcccaggtgactacggctgg

SEQ ID NO: 13933 - DNA, 146 bp, Glycine max
  Clone ID: 701068104H1
ggcgagtagctgtgtgtcttctacgcctcactttctttcaattccaactcgtgtaagagcgaacagaagaatatccactttggtggcaatggcattcccttcttcttcttcttcatttccatttctgcttcttccgccagcactcc

SEQ ID NO: 13934 - DNA, 262 bp, Glycine max
  Clone ID: 701068105H1
ggaaggaggaaagatgaacacagacatcactgcatcgacgaagccagagtacccagtcattgatcgcaaccctcctttcaccaaagtcgtcggcaacttcaacaccctcgactatctccgattcgtcacaatcaccggcgtttccgtcaccgtcggctacctctccgggattaagcctggaattaggggtccttcgatggtgacagggggtttgatcggtgtgatgggtgggttcatgtatgcttaccagaactccgctggg

SEQ ID NO: 13935 - DNA, 178 bp, Glycine max
  Clone ID: 701068107H1
tccgcaaccttgaggacgaaacccgatgattgacgatttggtatggtagtttgctcaaatcatgtgttatttccaattgtaagaggcagtctagcatcgcagggttacaccgtcccgagtgttcttatatttgactgtttgattcattcatatcacatttatttcctttcttggtgct

SEQ ID NO: 13936 - DNA, 215 bp, Glycine max
  Clone ID: 701068108H1
cggtcagttgccggcacaatggtttcgctgaaactgcagacgcggctcgcagccagcgtcctcaagtgtggcagaggaacggtttggcttgaccccactgcagtcaacgaaatctccatggctaattctcgccaaaacatacggacgctggttaaggctgggtttattatcaggacgcccaccaagattcactctcgctcacgtgcccgccgaat

SEQ ID NO: 13937 - DNA, 259 bp, Glycine max
  Clone ID: 701068109H1
taactatgccagtatcattttcatggccctcttcatctctatagctgcaactggcatcctggaaatgcagtggggaggtgtcggtatacacgactggtggaggaatgagcagttctgggtcattggtggtgcctcctcacatctctttgctctctttcagggtttgctcaaagttctggcaggagtcaacacaaacttcacagtcacatccaaagcagcagatgatggagagtttgctgaactctacatcttcaagtgg

SEQ ID NO: 13938 - DNA, 260 bp, Glycine max
  Clone ID: 701068110H1
taagagagagagagatggcatcgttttgtgctgcaaggactttcaacattccggcgatgaacgccggcgttcttcgccgccgggcatcgtgggccgccggaatagtcggagcctcggtggccggcgctgcacttttgcgctcttgttcgtctaagcgctctgcgccattcgcttgcatgagactctctactgataccagtttacaggaagctgttcaaactgaaaaggccccagcggcattggggccatactctcaagca

SEQ ID NO: 13939 - DNA, 261 bp, Glycine max
  Clone ID: 701068112H1
gaaaatcattccaatacacatggcttccgaaaggcaagcgttaatgcttattctcttaacaacattcttcttcaccataaagccttcacaggccagtactactggtggcataacaatctactggggccaaaacattgacgacggcaccttgacttccacatgcgacactggacacttcgagattgtcaacctagctttcctcaatgcgtttggttgcggcataactccatcatggaacttcgctggccactgtggggactg

SEQ ID NO: 13940 - DNA, 261 bp, Glycine max
  Clone ID: 701068113H1
ctcagattatggcagctgatgatctccatgtcttttcacaactatcaacagctaacattactcagaggattaccatcccttattcaggtgcctttaatgtcatacagcatagactcaaacagatatatgacagtgtagctcagtcagtggatgaagaatctggagttcccacattgcaagtccatgagtgtgttactgtgaaacatgaatctgaaaagcatgtctccttgcattgggcctctgatcccatgagtgacatgg

SEQ ID NO: 13941 - DNA, 265 bp, Glycine max
  Clone ID: 701068115H1
ggaaaagacgctgtaactgtagaaatgaggtttatcacaagcaaattgggcctgggatgtttcaacagatgacagagcaggtctgtgagcaatgtcccaacgtcaaatatgtaagggaggggtatttcatcactgttgatattgagaaaggcatgcaagatgggcaggaggtgctattttatgaggacggtgaacccataattgatggagaatctggagatttaaggtttcgtatccgtactgcacctcatgacgtcttcagaag

SEQ ID NO: 13942 - DNA, 259 bp, Glycine max
  Clone ID: 701068116H1
tcaaaattcaactcaaacactcttcccaaaaccctagattccctccaaacagaaaactacaataccaaccctcaccaatttctactccatcaaagatttatcccaacacactaccaaaaacgattactaaatcctcattaatggaaagatatacgacgtaacacaatatttagataatcatcccaatagagataatataatcctaaccgcaaccgggaaagacacaacagaagaatttaaagatactaaccacaacaaa

SEQ ID NO: 13943 - DNA, 258 bp, Glycine max
  Clone ID: 701068117H1
tccattccttatggctgggaaatacgctgagcgtgttggtgctggtgctcctgtgtacctctctgcagtgctcgagtatctcgctgctgaggttttggaattggctgggaatgctgctagggataacaagaagaatcgtattgttcctaggcacattcagcttgctgtgaggaacgatgaggagctgagcaagcttttaggatctgttaccattgccaatggaggtgtcttgccgaatattcatcagactctgcttcc

SEQ ID NO: 13944 - DNA, 261 bp, Glycine max
  Clone ID: 701068118H1
gcaaaatggaagaccatgtctgatgctgaaaaagcacctaccgtggcaaagtctgagaaaaggaaagtggagtacgagaagaacatgagagcctataacaagaaacaggcggaaggtcctactggtggggatgaagaagaatctgagaagtctgtatctgaggtgaatgatgaagatgatgatgaggaaggcagtggcgaggaagaggatgacgattagagaatggactgataattgcatttatgtaggttctgatgattt

SEQ ID NO: 13945 - DNA, 260 bp, Glycine max
  Clone ID: 701068120H1
gccaagggaaaaacaaaaaacctgacctttccctttctccaaaggatcatcgaactaaaccaaatcaaaatcaaactttgtcacagttattggtgtgctccctccgttagttatataagacccttttataaactccttttaaggcttttcaatctccaatcacttcttcttgtgttgtcataacttcaacaacttctttcttctcgatctcacgatggctcatttggccctgtctcagatggctgtaactgttcctgttg

SEQ ID NO: 13946 - DNA, 257 bp, Glycine max
  Clone ID: 701068122H1
aattggcagaatgtctctcaaatgttttggcctctaccgttcaagttcatctcagagacagtatccaacaataatagaagagttgtgccataaattttctctagcggatcttaggaagtcaaccaacgactttgatcaaaacagagtcattgacattagagcatttggtatcaaaatatataaaggttgtcttcaacataatgatggttctgattatgcagttgcagtaaagcgatttaaagtgacagatattcaag

SEQ ID NO: 13947 - DNA, 221 bp, Glycine max
  Clone ID: 701068123H1
ttcaactcatacggagtcctcagctcaaaacatagtgggacacaactgaatacttcaaaattctaattaggcctccttctctgtgcagcttccaccaaatcaatcgccttcttcttgttcgtcaccctctactagctttatccaagctaccaccactatcacccttttcccaaacctattattattcatacacacccacacggataaattctcacatatat

SEQ ID NO: 13948 - DNA, 257 bp, Glycine max
  Clone ID: 701068125H1
ctaagcttgctactgagtttccacactgcataccttaggtcttccgaattcgaagttaatttgcacgatggctaaggaaaaggctcagatcaacattgtggtggttggtcatgtggaccctgaggaggcaaccaccattaacgagctgaagaagcctgttgtggagaaagaagctccagggcatgccatatgagggcatgcacgtacggcctcggcggggaaccagaaaattatgttaacaaaataatctggaaccc

SEQ ID NO: 13949 - DNA, 258 bp, Glycine max
  Clone ID: 701068126H1
cctcgagccgattcggctcgagacatccttcaccctcattctccacatcctcaccacattactcatggcccaaacccaagcccaagctcccgcaccggccccctcaggcgcggtgaacctcaccgcgatcctggaaaagggtggccagtacaccaccctaatcaaactcctaaaggacacacaacaactcactcagatcgagtcccagctcaaatcaaactcacaaggcttcactctcttcgcacccactgacaatgc

SEQ ID NO: 13950 - DNA, 258 bp, Glycine max
  Clone ID: 701068127H1
tgttgatcgagataactagaaacagtgtgatgaaaatgaaggtccttgttttcttcgttgctacacttttcgtagcatggcaatgccatgcgtacgatatgttccctctccgaatgaacactggctatggtgcccgtactccggaggtgaaatgcgcaagttggaggcttgctgtggaagcacacaaactctttggctttgagaccattcctgaagcgtgcgttgaagcaacaaaggcatacatccatggcgaacaat

SEQ ID NO: 13951 - DNA, 258 bp, Glycine max
  Clone ID: 701068128H1
cacccacacaccctcgcatccatcgtaatcaaaacttaattcacatttttgtttgggttttttcatcacagtgcttttctttccttccttctgagattgctgaagagagaaaagcaaaatcgaaagaactgaattggatttcattggcggagtgcaagtgaagtgttgcgcaaatctgattggcaagaatggcgccagtgtcagctctcgcaaagtacaagctggtgttcttgggcgatcaatccgttgggaaaacca

SEQ ID NO: 13952 - DNA, 246 bp, Glycine max
  Clone ID: 701068130H1
acggctcgagcaatcaataatcaagttacccacagaccaaccaagggtagagaaactgacccacttgcattttttctaccacgacatcttagtgggcaagaacatcacggtggtgaaaatcatcgagccatcagcgagcgaggttcgtgaagcaactgggtttggaaccactttcatgatggacaatgttttgaccgagggtccagagctgagctcgaagcacgttgggagggctcaggggctgtt

SEQ ID NO: 13953 - DNA, 264 bp, Glycine max
  Clone ID: 701068131H1
tgaaaattgggattaaaaacagagaattatggttgggttgattagcaaagtaatgttgtgaatttggatgacccagatggggaattagcgtggaaaggtgaaaaagagaagaactttggatctgtgtgcgcggattgggaagtgggtgtgcgtggaatttatgcaggggaaaagaaaaggggaagagagagagagagagagaaattggattggaggggcgaggattgagcaacaagatagagctaaggagtgtttatcggcgaa

SEQ ID NO: 13954 - DNA, 285 bp, Glycine max
  Clone ID: 701068132H1
caaaattcaactcaaacatccctaacacatacataacagaatcagaaacagagacacaccataaaacaaaaacctacaaaatattataaagcaattaagaacaaaccataccccaaatcacatttctaccataatattcctaatcccaaaatcaaaatttataatattaatataaagcagacgaatattaataaatttcctttctatatccatctaattaattaaaagacggcaaatatttcaaataaaaccctaaaaactactcgcattacttacaacaaatac

SEQ ID NO: 13955 - DNA, 263 bp, Glycine max
  Clone ID: 701068133H1
ctcagattgcaattgcctcttctcttctcccagaatcggtcactaatccgatatcatgaagctcgatacgactagtctcgaatcgtttcccacactgattgcacctacaaacgacgtcgccggagaactctccgccgctccgttctttgaccttccgaattccaatgacttcgatgggttcttgaaagacgctattcagatggtgaagcccgcgaagggtactacaactcttgcttttatatttaaagagggtgttatggtag

SEQ ID NO: 13956 - DNA, 253 bp, Glycine max
  Clone ID: 701068134H1
tggttggataggtgagagtgttgattccatcaaatctcttcagatccgccaggtcctcacccaggctgttagcctcggcatgattgttacctctgcactgataatatggacggcattgatgtgcattactggcagtgaatctcctagttgttgttgtactttctggaagcatggaacccggtttcaagcggggagacatcttattcttgcacatgagtaaagacccattcgggcaggggacattgtcgtgttt

SEQ ID NO: 13957 - DNA, 79 bp, Glycine max
  Clone ID: 701068135H1
cttttgttgacttaaaaccgcaattgaaacctcattctgcatgctacctaaaaaaaaaaaaaaaaaaaaaaggggggaa

SEQ ID NO: 13958 - DNA, 256 bp, Glycine max
  Clone ID: 701068136H1
gtctcttcaatgaggctatggcaagtgattcccgaatagtagacttggcactcaaaaattgcacttcagtttttgaggggctagattccatggtggatgttggtggtggaactggaaccacggccagaattatctgtgacgcatttcctaagttgaaatgtgttgtgcttgaccttcctcctgttgtagagaacttgacagggaccaataatttgagttttgttggtggtgacatgttcaactctatccctcaagc

SEQ ID NO: 13959 - DNA, 256 bp, Glycine max
  Clone ID: 701068137H1
ctagaaaagaagcaccaagcgaagcagcgaagtgtctttcgattccttcgtgcgtgcgattctcctgatatccaaggtgaagcaccgacaccggacctatctccggcgaatccccagtccccactttcttccttcgaaatgaatcccgagtatgattatctgttcaagctccttcttattggagactctggtgttggtaaatcatgccttcttctgagattttctgatgattcgtacatcgaaagctacataagca

SEQ ID NO: 13960 - DNA, 251 bp, Glycine max
  Clone ID: 701068138H1
cgcctgtcatgcaatggctggaagaaagcaggattatgcagggagagattcaacagttgaaagacaagctagctatatcagagagaacagctagggcagagtcacaattgaaggataaactgaagttgaggcttagaacactagaggaaggcttaaagcatttctccagttatccaatcactttgaatgtgtcttatgcatctccaaaagcagaaaagtctaacatactagcttccctaacaaccaatggt

SEQ ID NO: 13961 - DNA, 254 bp, Glycine max
  Clone ID: 701068139H1
cggtttacgcaaccttgaggacgaaacccgatgattgacgatttggtatggtagtttgctcaaataatgtgttatttccaattgtaagaggcagtctagcatcgcagggttacaccgtcccgagtgttcttatatttgactgtttgattcattcatatcacatttatttcctttcttggtgctggtttggcttttgatctagtctcatgtgtagctataatcatgtgtttcagtcatcctcagtttgtttattg

SEQ ID NO: 13962 - DNA, 255 bp, Glycine max
  Clone ID: 701068140H1
actctagttctctcactttaactattttcataaaccaaagattaaaagggtcactcctttctttttttacatagttacataacatgtcttcctcagagggtgcctatgaattgggaagtgagttctcagaagccaacaatgttcttctcatgtctctaatggaagaaacacaagaagaagagtactatggcgatgagagacttgtgagcatgattcagtcattggaggcagagatcactgacactgaaataggtc

SEQ ID NO: 13963 - DNA, 255 bp, Glycine max
  Clone ID: 701068141H1
caaaaagacagaatcccaggcgaggagaacgatggcggggaaggagcaggatgtgtcgttgggagcgaacaagttccccgagagacagccgattgggacggcggcgcagagccaagacgacggcaaggactaccaggagccggcgccggcgccgctggttgacccgacggagtttacgtcatggtcgttttacagagcagggatagcagagtttgtggccacttttctgtttctctacatcaccgtcttaaccgt

SEQ ID NO: 13964 - DNA, 254 bp, Glycine max
  Clone ID: 701068142H1
tgttgaaaccttagtctgaatccaacaacaatcaatcactcaatccttgtctcatcctataaatcagaacctgtaagccaaaccaagtttcacaaacttaagattcatctccttggcctacaaaacatggttccaaacccccaactcaagtatggtcttctcctcttttattgtacttttgcctttaacttgttatccactcctgcctgtgccctcaacataggggctgtaaccactggagtcgctgtctctgt

SEQ ID NO: 13965 - DNA, 255 bp, Glycine max
  Clone ID: 701068143H1
aattggcagaatgtctctcaaatgttttggcctctaccgttcaagttcatctcagagacagtatccaacaataatagaagagttgtgccataaattttctctagcggatcttaggaagtcaaccaacgactttgatcaaaacagagtcattgacattagagcatttggtatcaaaatatataaaggttgtcttcaacataatgatggttctgattatgcagttgcagtaacgcgatttaaagtgaaagatcattc

SEQ ID NO: 13966 - DNA, 256 bp, Glycine max
  Clone ID: 701068144H1
tccccatttgcatttcttccgtagaaccagtagtcaaaacttgaaatcaaatcaggagcgggggaaaaagaaaagagagagaagtagggttcgaaaatggcagcagaatcatcagagggcgaagaagaaaccaagttaagcggagggagcttattgctgaccgttgacgacgacttaacggaaatgggaaagaacgccgcttggagcgtcagttcctgcaaacccggtaacggcgtttcctctctccgtgacgaca

SEQ ID NO: 13967 - DNA, 256 bp, Glycine max
  Clone ID: 701068145H1
gtagttttggacagtctcataaaacccttgttacgttgcattaatatctatagttagtcacaacacttcattagttttcaatatgttttcaacggctactgcagacggtgttccgacgccgtacaattctacggtggcgacgatgctggggcggcggcggattccgatacacacgacgttctactgggggcacaaggtggacatactgttccggtgctggcccggggacagcgccgccatgtacgcggtggcgctg

SEQ ID NO: 13968 - DNA, 258 bp, Glycine max
  Clone ID: 701068146H1
actcagttatcttcaacttcgtttttgaggcagttaagtgcaaaaaaggagggttggaaagagagatactataatagtggtagtggtggctgaggaatgaactttggagggtgtgaggcaagtgtgaaactaatggaatggtttaacatgcaggggaatgtggggacgaagatggtaatggtggtggttgatgacacctcacattccaagcatgcaatgttgtaggcactacatcatgttgccaccacgggtgattcc

SEQ ID NO: 13969 - DNA, 259 bp, Glycine max
  Clone ID: 701068147H1
gacttgactcggggtgagttgactcagcgatggcggaagaggtgactcgggtgatggtggcagtgaacgagtcgagcatgaagggataccctcatccttcgatccgcagcaaaggggctttcgaatggaccatcaaccagatcgttcgcaacaacgtctctgccttcaaccttctttttcttcacgttcaagtccccgatgaagatggttttaatgacatggatagtatctacgcatcgcctgacgattttacgaacat

SEQ ID NO: 13970 - DNA, 259 bp, Glycine max
  Clone ID: 701068148H1
atcgagataactagaaacagtatgatgaaaatgaagatccttattttcttcattactacaattttagtagcatgacaataccatgcgtacgatatattccctctccgaatgaacactggctatgatgcccgtactccggagatgaaatgcgcaaattggagacttactatggaagcacacaacatctttagctttgagaccattcctgaagaatacgttgaagcaacaacggaatacatccatggcgaacaatatagat

SEQ ID NO: 13971 - DNA, 260 bp, Glycine max
  Clone ID: 701068149H1
catctcttgtttcttgctttctttcttcaccatgtcacttgctgggaaaatcaccactgaaatcggggttcatgcaaccgctacaaagtggttcaacctcttcgcaacacaactccatcatgttcaaaacctaactgatagagtgcatggaaccaagctgcatcaaggtgaagactggcatcacaacgagacagtcaagcactggacttataccatagatggtaaggttacaacatgtctggagagtattgaatccattg

SEQ ID NO: 13972 - DNA, 245 bp, Glycine max
  Clone ID: 701068151H1
tctacctgctatttcctctgacagctgtttgcagaaagttgtgatttttccttgaaagatggcatctttgagcatgatccagatcagaactgggaattgtgcatctgggtttggtttgaattgtgctgggaaggttaaggttggtctcagcagagttgggtttaaggtgtttgcttcagagactcaggctacagagcctgatcttagtgtaactgttaaaaggttgcagctgcctaacccctttg

SEQ ID NO: 13973 - DNA, 253 bp, Glycine max
  Clone ID: 701068152H1
ggcaattgcagagccagtcttagttaattactagtattctgtgtataatctctctctaccttgggtcatagctggtttttttcttgcttgaccagggagaattagtccacttaatatgtttctcaagtgcatcgctgtaatctactacttttaattataaaaatatggatttattattgtaaaaaaaaaaaaaaaaaaaaaaaaaaaaaaaagaaaaaactaaaaaaaaaaaaaaaaaagaagagaaagaaaa

SEQ ID NO: 13974 - DNA, 256 bp, Glycine max
  Clone ID: 701068155H1
gcaaaaaggaggaaaatcatcaaagatcccaaaggacttccttgtacagatgcttggggaagaacgtgtcaccaagttttcaatacaagaacatactcaattctaccatggctgattatgtgaaaaaggaaaacttggatgtaaaggaccggaagataagcactacccaaacgcaagaacaactcaaaaaatcattcaagccaggaaatgaatttggctttaatgttataattgagcctgaaaattcataagattc

SEQ ID NO: 13975 - DNA, 251 bp, Glycine max
  Clone ID: 701068156H1
actacttcaagggaaaccttctaatagagacaaaaacaatggtgactgcaggattgaaatgggcaccagagatgtgaccaacagagtaaaccagtaccatcacaaccagtccccaaacaattgatatcccaagatgtattacaacgttattattgttcttattcaccaccactgaagcacaccctgcaaatatcaagaaatatgttcccaccacctcagctaccaactgtatccatcaacaaacaaaatca

SEQ ID NO: 13976 - DNA, 253 bp, Glycine max
  Clone ID: 701068158H1
ctttgtttcgcagacctcaccaaccccttttagctcaccctctcactctcagccaccgcacgccgccgtctccggcagccactcataaaaggggtgggttaggctttgcaaccattggaagttccaacaatggcaggcatagctatacttttagatctatggaggaaaaatcaaaacttgagctctggattgcactcctctcatgcttttcagtcttccagtgacttttcttctgcctctgctgcaactgctg

SEQ ID NO: 13977 - DNA, 252 bp, Glycine max
  Clone ID: 701068161H1
gaaaaagagctgcaatccgatttgcagatctcaagaggcaaagatattggttcccgttaatggttggtattggcttacttgttcttcagcaattatctggtatcaatggacattttgttctattcaactaccatctctgcaaatgcaggaatttcatccagcgaaggcctaccagttggacttggagccgttcaggtcatcgcaactggcattcccacatggttggtggatctacgtcgccggaggtgcttc

SEQ ID NO: 13978 - DNA, 175 bp, Glycine max
  Clone ID: 701068162H1
cacagattcagcctttctcagtttctctctctagaaaaaccaaacctcgctactctcttctccctttttttttgtagttctttccttatttggccttcacactccgaactgcgaaatccttttttagcaaaaaaaaaaaaaaaaaaaggggggcccccaactaagaaacccggca

SEQ ID NO: 13979 - DNA, 275 bp, Glycine max
  Clone ID: 701068164H1
attcaactcaagtacccctctctctatttcccttctctttatcttcctattaacaccattactcttaactcaatctccaccttctccttcttacttcttcttcttcttcttctattacctacaaaaacacactatatccaaaactctaccgttccattctctcaaccattcgttcatccccttacaacccttataactataacaagttctccataaaacaaacctcaaacaaacaagaccactagaccaaatctttaagaactttctccaacacc

SEQ ID NO: 13980 - DNA, 235 bp, Glycine max
  Clone ID: 701068165H1
gctattccgcattcagtacttgccaaaagtgcgatgagatccccacctgttatgagcatctctgactgtgaactctttggtggcagccgtcttgaccgcctttcccagtgcatgtgcccttgaacatggttcatgcagcttcattgatacacgatgatcttccctgcatggatgactccccctcaagccgtggtcagccttcaaaccataccatctatggtgttgacatggcaat

SEQ ID NO: 13981 - DNA, 256 bp, Glycine max
  Clone ID: 701068166H1
ggagtcctgaattttgacgaaatcctgcgcgagactgatgcattcatggtggcacgaggtgatcttggaatggagatcccagttgaaaagatattcctggcgcagaagatgatgatatacaagtgtaatctggttgggaagccagtggtgactgctacccaaatgcttgaatcaatgataaagtctcccaggccaacccgagctgaagcaactgacgtagccaatgcagttcttgatggaacagattgtgtgatgc

SEQ ID NO: 13982 - DNA, 253 bp, Glycine max
  Clone ID: 701068169H1
cggcgacgttcccttcactcacgccaacgtcagcttggccttcagggatttcgcctacaaacccaccaccgatctctccaccggtctcagcaagttcgtcaagtggtacctcggttatcacggcctccagccaagcctgaaaaaggataatcaccttcacaatattgaatgaccatttctataattatctctcctctattttgttctttttacggcaagaaaaaaaaaacaaaaaaaccttccccttgctcat

SEQ ID NO: 13983 - DNA, 251 bp, Glycine max
  Clone ID: 701068171H1
tccatctcttgcttcttgcttctattacttgcttctttcttcaccatgtcacttgctgggaaaatcaccactgaaattggggttcatgcaaccgctgcaaagtggttcaacctctttgcaacacaacttcatcatgttcaaaaccttactgatagagtacatggaaccaagctgcatcaaggtgaagactggcatcacaacgagacagtcaaacactggacttataccatagatggtaaggctacaacatg

SEQ ID NO: 13984 - DNA, 254 bp, Glycine max
  Clone ID: 701068172H1
gcagtggtacattccaagcttgtcttcatgccgaagctttcgcgagaggaggaggaagacaagtcctgcaataaaagtaaatggaaagcattgatttctctagcaatcagatgaatcaaagtttctctgatgagtttaatttatacactattatcaatgtaaagcattttttacacagatatccaataagatttgattattttatcacgtcatcgaattcataaatataatatggtgataaagtaaattgttat

SEQ ID NO: 13985 - DNA, 247 bp, Glycine max
  Clone ID: 701068173H1
gttatatttcaggaatcttcatctttgagaaacataccagtggtgattatgtcatctgaaaatgtgcctttaaggattaacagatgtttggaggaaggagccgaagaatttttcttgaagcctgtgaggttgtcagatttgaacaagcttaaaccccacatgaagaaaaccaagttcaaagatcaaaagcaagaaacagtagaaaggtttgaagactcagaagttcaacagcaacagtcacaacaac

SEQ ID NO: 13986 - DNA, 245 bp, Glycine max
  Clone ID: 701068174H1
ccttcttgaactcaaggcgatggctctgggcagaggcagtgcagtggttctactactttgcttcttgctgcttcactctcagatggctcgtgctgccacctacacagttggcgattctgggggttggccctttaacactgttgcctggcccacaggacagctctttcgggctggtgacacacttgctttcaattatagccctgggcctcaccatgtggtggccgtgaacaaggctggatatgata

SEQ ID NO: 13987 - DNA, 247 bp, Glycine max
  Clone ID: 701068175H1
atcacattgaacaatggtgaaggctgtggccgttcttggcagcagtgagggtgtcactggaactattcacttcgttcaggagggaagtggtccaaccaccgtaactggatctcttgctggtcttaagcctggtctccatggtttccatgtccatgccttgggggacactaccaatggttgcctctcaactggatcacatttcaatcctaataacaaggagcatggtgcccctgaagatgagaatcgt

SEQ ID NO: 13988 - DNA, 250 bp, Glycine max
  Clone ID: 701068176H1
ctcactcacaaacacacactgaactaaaaaacatcaaaagagacatggctgagcaaaccttcaccatgatcaagcctgatggcgtccaaagaggccttattggcgagatcattagcagatttgagaagaaaggtttctacttgaacggtttgaaccttgttactgtggaccgtccttttgctgagaagcactatgctgatttgtctgccagcctttctttagtggtttggtggattacattatctctggc

SEQ ID NO: 13989 - DNA, 250 bp, Glycine max
  Clone ID: 701068177H1
cttgggtgtagaaacagcgaaagagaaagagagagagagagagagatggcgtcgggctggggaattaccggaaacaaaggtcgctgctacgatttctggatggatttcagcgagtgcatgtctcgctgccgtgagcccaaggactgtgcttttctccgcgaagactacctcgagtgcctccaccattccaaagagtttcaacgacgaaaccggatttacaaggaggagcagcgcaaactaagggctgcta

SEQ ID NO: 13990 - DNA, 254 bp, Glycine max
  Clone ID: 701068178H1
cagactcactgctatcactcaactggttcatcatggaatgatattcgttccaatcggttacacattcggtgccggcatgtttgacatggagaaagtgaaaggtggaagtccatatggtgctggaacttacgccggtgatggctcaagacagccaagtgcgcttgagttacaacaagcattccaccaagggaagtacattgctggcatcacaaagaagctcaagcaagctgcataatgttgccttgccttcatat

SEQ ID NO: 13991 - DNA, 256 bp, Glycine max
  Clone ID: 701068179H1
cggtcggattcgtattgatggtgaacaagcaaggccaaactcgccttgctcaatattaggaatacttcactctcgaagagcgacgtgccctcgaagagcgaatcgttcgcaaatgcttccgccgcaacgaacagcagtgttcctttgttgagcatcggcaactaacaaaattgtttatcggcgctacgcctctttgtttttcctcgttggagtcgacgatgatgagaatgagctaggcattttggaatttatacat

SEQ ID NO: 13992 - DNA, 250 bp, Glycine max
  Clone ID: 701068182H1
cagtacccggtttcgacactcgcgtctccccctcagtttcggatctctcccttctctcaccaatttccagattccaaaccaggattgaggaagccagtgttcaccaaggtcgatcagcttcgtccagggaccagcgggcacactttaactgtgaaggtggtcgatgctaagatggtgatgcagaaaggtcgttctgatggtcctcaatcccgccaaatgcgaattgctgaatgtttggttggtgatgaga

SEQ ID NO: 13993 - DNA, 251 bp, Glycine max
  Clone ID: 701068183H1
cgaatggctcccaagggtttaacctttctggctgtgttaatatgcgtttcagcactgtcactgagtccttctgttgcgggggaagggcaaaataatggccttgttatgaacttctacaaggaatcatgccctcaggctgaagacatcatcacagaacaagtcaagcttctctacacgcgccacaagaacactgctttctcctggctcaggaacatcttccatgactgtgctgttcagagttgtgatgcttc

SEQ ID NO: 13994 - DNA, 245 bp, Glycine max
  Clone ID: 701068184H1
gcttgcacttcgaggtgatccaccgcatggtcaggacaaattcgtccaggtcgacggcggctttgcctgtgcacgcgacttggtgcaacatatcagagctaaatatggtgactactttggcattacagtcgctggttatccagaggcacatccggatgttatagaaagtgatgggttggctacatcagagggttatcaaaatgatcttgcttacttgaagagcaaggttgatgctggagcagatc

SEQ ID NO: 13995 - DNA, 241 bp, Glycine max
  Clone ID: 701068185H1
cttcctccatttacttttattctatctcactttcatactcacccacattgcaggttaacttcagccttattttgacctcaatggcaccaagttcggcagtgccagatgaacaggttgttgttggagaggagatagagcatgtaagagcgatcactttgaacaggccaaggcaattgaatgccatctcaccagaattggtttctctgctagcaacatatttggacaagtgggagacggatga

SEQ ID NO: 13996 - DNA, 247 bp, Glycine max
  Clone ID: 701068187H1
aatattgagccctgtaattacagttgctaccatgataacttctcttattattgtggcctactttattgctaatgtgtactgaactgaggtatgtcgtgatgtaagctgcaataagttaattgtctgtagctttattgtatccccttcatggggttctgataattacatccttttagtagtgttgtggatttggcatagacttgttcaagtaaataatggcatggcttgcgaaattttatttgtcaaa

SEQ ID NO: 13997 - DNA, 274 bp, Glycine max
  Clone ID: 701068188H1
acacatacataagctcaaaattcaactcaaggggtctcttccattcacaaccttaaacctttctttcttataaactttattaattaattctaagaatagaactaagagggtatagacatagctaacacaattacaacttcttttttaattctacttctaactttccccactatatttggaactgaccatgaagttggtgacactagtagataaaccctcgaaattaattacaacacctaaacctctaggaaaactttcacaattggtgacactt

SEQ ID NO: 13998 - DNA, 211 bp, Glycine max
  Clone ID: 701068190H1
cttgaaataaaataaattattgtccaaatcccgtctacacatagacccaacataactcatgttgctagagtagttttctcacaaccatcgtgcacacaggccaaaacatctctagcaacatgagtcatgttgtgtctatgtgtagacccgatatggacttgaaataaaataaattattgtccaaataaaacacaaaaaaaaagggggggcc

SEQ ID NO: 13999 - DNA, 248 bp, Glycine max
  Clone ID: 701068191H1
cgaatggctcccaagggtttaacctttctggctgtgttaatatgcgtttcagcactgtcactgagtgcttctgttgcgggggaagggcaaaataatggccttgttatgaacttctacaaggaatcatgccctcaggctgaagacatcatcacagaacaagtcaagcttctctacaagcgccacaagaacactgctttctcctggctcaggaacatcttccatgactgtgctgttcagagttgtgatgc

SEQ ID NO: 14000 - DNA, 248 bp, Glycine max
  Clone ID: 701068192H1
cttattctttgatagtgcaaccaacaactatcatgtggctgtcatcattattctttgatagtgctaatctccatttaaattcaataaaaaagtcatcttcaacttctgggaattcattcttgaggagctatagaaaacttaatcacatagttattgtctagtacatataaatcctagagccctgctttactgaatgaagctacaaatttcatacaagacataactcattagagagtagaatcagcaat

SEQ ID NO: 14001 - DNA, 252 bp, Glycine max
  Clone ID: 701068193H1
cttgctaccaacactgagcttaaccgagcttcgcaaagatgaatcgggaaaagttaatgaagatggccggttcggttagaactggaggaaagggtactgtgagaagaaagaagaaggctgtccacaagacaacaaccacagatgacaaaaggcttcagagcaccctgaagagaataggggtgaatgccatccctgctattgaagaggtcaatatctttacggatgacgtagttatccagtttctaaatccca

SEQ ID NO: 14002 - DNA, 239 bp, Glycine max
  unsure at all n locations
  Clone ID: 701068194H1
cacactgcataccttaggtcttccgaattcgaagttaatttgcaagatggctaagggaaagggtcagattcacaatgtggtgggttgtcctgtgggaccctgaggaggcaacaacatttaacgagctgaggaagcctgtgtggagacagagctccaaggcatgcatatgaggcatgacgtacggctcggagggcancagacaatatgtaacacatatctggaacctatgtatcagtgtc

SEQ ID NO: 14003 - DNA, 172 bp, Glycine max
  Clone ID: 701068195H1
gtgatcactcaatttcatgggcagtggaatatcattactctctactacaactacaagcacttctcaactacccatgtactataattcctcttgctatcttattcatcaaggttccctcctttcaccacgtttatatataaatcacatttcccaattcccacgcacacaaacc

SEQ ID NO: 14004 - DNA, 260 bp, Glycine max
  Clone ID: 701068196H1
tgccagtggtggcaaagatggggttattcttctgtgggatttggctgagggtaagcgtctttactctctcgatgctggctcaatcatccatgcactctgcttcagccccaacaggtactggctctgcgccgccaccgagcagagcatcaagatctgggatttggagagcaagagtatcgttgaggatttgaaggttgacctcaagactgaggctgatgccacctccggtggtggtaacgccaacaagaagaaggttattt

SEQ ID NO: 14005 - DNA, 286 bp, Glycine max
  Clone ID: 701068201H1
cgagccgattcggctcgaggcaagacagtgtatttatgtggaactagatcaaagtaccgatagcaaaggtgtattttggtacaacaataagttgtgatgattaatgtagccgaggcttctttgaactttcccttgtgactgtttagtatcatggttgcttattgggaataattttgttgaaccctgatgttggtagtaagtatctagacagttgcatagcggttttctcttacagactaagatatagcctctctgaacagtttgattattgcaccaggtttgcaat

SEQ ID NO: 14006 - DNA, 285 bp, Glycine max
  Clone ID: 701068202H1
atcgcagactggcgtgttaccaaacacagacacaacacaacacagtgctctgttgctacttctacttgccggcggcacctagttcaccgagaagagtgttccaacacaacacaacatcaccaaaatgacaatttcaccctctgtgaccttaacacccaccaccccgagaatcaccgcaacaacccacacttcccacacttcccacacttgccagcccacctatctcaatatcaatcctatttccagaccttcccctctacgcgccttcctccccctcacatcacg

SEQ ID NO: 14007 - DNA, 280 bp, Glycine max
  Clone ID: 701068203H1
taactatgccagtatcattttcatggccctcttcatctctatagctgcaactggcatcctggaaatgcagtggggaggtgtcggtatacacgactggtggaggaatgagcagttctgggtcattggtggtgcctcctcacatctctttgctctctttcagggtttgctcaaagttctggcaggagtcaacacaaacttcacagtcacatccaaagcagcagatgatggagagtttgctgaactctacatcttcaagtggacatccttgttgatccctccc

SEQ ID NO: 14008 - DNA, 278 bp, Glycine max
  Clone ID: 701068204H1
accagccgaaagccaagaaaaagctttcgatccctgtaactgcgttcgactatttagggtactttcggagacaatggcggatgaatcggagcacacggcggcgcggctgccggcgaatcgctgctcgacaagatcgccgagaagattcacggccacgacgactcttcctcttcctccgattccgattcggataaaaaggaatcttcgtcgattaaggagaaggttttccgcctctttggaagggagaagccagttcactccgtcctcggcggcggaaa

SEQ ID NO: 14009 - DNA, 276 bp, Glycine max
  Clone ID: 701068205H1
cgcatagataacaccgtactctctaatatcccatactatgaaaaacatggatatggggtggaggaatttaatgaaaccttatatgatgaatgggttaacaagggcgacgcaccggcattgccagagactcttaaaaattacaacaagctgttgtctcttggcttcaagattgtattcttgtcaggaagatatcttgacaaaatggccgtaacagaagcaaacctaaagaaggctggcttccacacatgggagcagtcaattctcaaggatccacat

SEQ ID NO: 14010 - DNA, 273 bp, Glycine max
  Clone ID: 701068206H1
tctagatcgcgagctgccgcccttttttttttccttagtatttatcttcaacttagctgttattctcgacttaaaatttgcagcattgttagctgtaattctgtttaataacttcatcatttgagcttagaaacaataagtacacccgtagggcgttactttctttttattattgtttgatgggtagagatcacatggcagcatttcgttacatgtgaaataatagaaaggttattgatgtatgtcttgtttattactgagtatagatccata

SEQ ID NO: 14011 - DNA, 276 bp, Glycine max
  Clone ID: 701068208H1
ctgacatgtcgccgacaagcttccggtgccggtggacacggccatcctcgtcaaatccatcaccatcggaaaattccgtctctagcgcgacgatcccgccatcatcaaggtcctcgtcgactccggtatccgaatcgtcatcggcgcctccaacggcgacattgcgagtctcgccggcgatcccaacgcggctagccagtgggttaacgcgatcgtcttgccctactacccggcgagcaacatcagtctgatcaccgtcggagacgacgattttga

SEQ ID NO: 14012 - DNA, 270 bp, Glycine max
  Clone ID: 701068209H1
cagaggaggcactgtggcagaagtcctaggagtgtaaaacagagacgcaaaatgaagacgatcttgtcgtctgagaccatgaatattcccgacggcgtgagcatcaaggttcacgctaaggttatcgaggttgagggccctcgtggaaaactcgtgcgagacttccaccatctgaagttggacttccaacttattaccgacgatggcggtaaaaggaagctcaagattgattcttggtttggttctcgtaaaacctccgccgccatccgc

SEQ ID NO: 14013 - DNA, 271 bp, Glycine max
  Clone ID: 701068210H1
tacagccgcaccttgattcagagcagagcgaccttgaagagctatggctgtcggaaagaataagaggatttccaagggaaagaagggtggcaagaagaaagccgctgatccctttgccaagaaggactggtacgatatcaaggccccttccgtctttcaggtcaagaatgttggcaaaaccctcgtctctcgtacccagggaaccaagattgcttctgaaggactcaaacatagagtgtttgaggtctcattggctgatctccaaggagat

SEQ ID NO: 14014 - DNA, 268 bp, Glycine max
  Clone ID: 701068212H1
caagaatatcaaattggtctcttgtcttcctcctcatctctacactactccacatatatcccagcctgtcaagcccaagcccaagcccaagcccaagcccgttcataaaatcctcctgcagcagcacccagtacccagccctctgcgtctcatccctctccgtctacgcctccagcatccaacaggaccctcaccaactggttcagacagcactctccctctccctgaaccgcacccaagccaccaaaaccttcgtggctaactgcaa

SEQ ID NO: 14015 - DNA, 266 bp, Glycine max
  Clone ID: 701068213H1
gtaattgtcaagtgaaaggacaaaaagttgcatagtgatacacagatggtgggctcaggagcatcagataggagcaaagaagctgttgggatgatggcccttcatgatgccctcagaagagtctgtctcaactcagactggacttactctgtcttctggaccattcgtcctcgcccgagagtccgaggtggcaatggctgcaaggttggagacgatagcggcagcttgatgttgatgtgggaagatgggttttgccaaggaagggg

SEQ ID NO: 14016 - DNA, 264 bp, Glycine max
  Clone ID: 701068214H1
ttaataacaagctagctattagttcgattttgtagtaagtgaggtgccaatatggtgaagatagctcttggtactttggatgactcttttagcgctgcctctcttaaggcttatttcgcagagttccatgcaactctgattttcgtgttcgctggtgttggatcagccatcgcttacaacgagcttacaaaagatgcagccttggatccaacggggctggtggcagtagctgtggcacatgcatttgcactgtttgtaggtgtc

SEQ ID NO: 14017 - DNA, 268 bp, Glycine max
  Clone ID: 701068215H1
ttcaactcatacggagtcctcagctcaaaacatagtgggacagaactgaatagttgagtattcacattaggggtcgaactctgtgaagattcgagcagttgagtgcggtgcagcttgtacgtcatccgctggtagctttatccaagctaccaccactatcacccttttcccaaacctattattgttcatacacacccacacggataggttgctcggtgtataagattagggaccctcctcgcacgactcctgcatttcgcactaccaa

SEQ ID NO: 14018 - DNA, 280 bp, Glycine max
  Clone ID: 701068218H1
cttgctcgccagaagtacaccgatgagtctgaggctactatcaaccaacagatcaatgtggagtacaatgtttcgtacgtttatcatgcgatgtttgcctacttcgatagggacaatgttgcgctcaagggtcttgccaagtttttcaaggagtcaagcgaggaggaaagggagcatgctgagaaattgatggaatatcagaacaagcgaggtggaaaggtgaagttacaatctatagtgatgcctcttactgagtttgaccatgaggaaaagggagatg

SEQ ID NO: 14019 - DNA, 270 bp, Glycine max
  Clone ID: 701068220H1
gtttgttgatgagtataagctagtttatcgtgaggagaatatgaagttgtttgtcttctttgttgctgcagtagttttggtagcatggccatgccatggcgcaggctaccaaaggttccctctccgaatgaaaactggctatggtgagcgttcttcggaggtaaaatgcgcaagttttaggcttgctgtggaagcacacaacatccgagcctttaaaaccattcctgaagagtgcgttgaaccaacaaaggactacattaatggcgaaca

SEQ ID NO: 14020 - DNA, 272 bp, Glycine max
  Clone ID: 701068221H1
cgggtctgttcctctccccactccctagctgtcttctccttctcctcttcacaatgatccaagagctggaaggaaggggaggatttctagccgtgctaatgaaatttcaggaactggtgtagatgattttgagttgaggagtcttgatgctgatgatttaaagatagaactacaggctaggaaacaacgagaggcagctctggaagttgcattagccgagaaggaatttgtggaaaagcagtaccggaaaaaaactgaagaggccaagagaa

SEQ ID NO: 14021 - DNA, 269 bp, Glycine max
  Clone ID: 701068222H1
ttctgagataaccacttttctctttgattcatcaatagcaaccgcgaggaccgtgaaggatgtttcgcctcacgatttcgtgaaggcttacgccccccatctcaagcgttccggcaagatggagcttcctgagtggactgatattgtaaaaacagcaaaatttaaggaattggctccatatgatcctgactggtattatgttagggctgcctcaatggcaagacagatttatttgagaggcggtcttggtgttggggctttccagagga

SEQ ID NO: 14022 - DNA, 273 bp, Glycine max
  Clone ID: 701068223H1
cttttaaataccatgtttcttctttctttaaaataatatttactaattgatcactaccaaaaacagctggtcttcttagatgcggaaaaagttgccgactgagatggatgaactatctgagacctgatataaagagaggaaacataaccccagaagaagatgatcttataattagaatgcactcacttttaggaaatatctggtccctcatcgcgggaagattaccaggacgaacagataatgagattaagaactactggaatacccatctca

SEQ ID NO: 14023 - DNA, 222 bp, Glycine max
  Clone ID: 701068224H1
cgaacagatcacactatggccacctcaagcgccaaatcagtccatgatttcaccgttaaagatgccaagggaaatgatattaatcttggtgactacaaaggaaaggtccttatcattgtcaatgttgcctcacaatgtggcttgactaattcaaattacactgagctcagtcagttgtatgagaaatacaaacagaaaggtctggaaattctggcatttcca

SEQ ID NO: 14024 - DNA, 268 bp, Glycine max
  Clone ID: 701068225H1
cagtcggacgtaggccagtaactggcttatgtctttgtctagaaggaagcaagcagaatcggctgagtgttcacgttcaacacttagtatctcttccgaacatccttcatccatattgggacagtcatgtcgctataggcgctcccaagtggcagggccctgaggagcaagacagccggtggtttgagcctgttaagtggaagaacttttctcacgtgagcacagcaccaattgagaaccctgaaaccttcataggagacttctctgg

SEQ ID NO: 14025 - DNA, 267 bp, Glycine max
  Clone ID: 701068226H1
gaaaagaggagtttgagaatggcaacgatcagcgcggttcaggtggagttcctggagtttccagcggtggttacttcaccagcctccggcaagacctatttcctcggcggcgcaggggagagaggattgacgattgaggggaagttcataaagttcacaggcataggagtatacttggaggataaggcggtgccatcactcgccgctaagtggaagggtaaaacttcagaggagttagttcacaccctccacttctacagggatatc

SEQ ID NO: 14026 - DNA, 264 bp, Glycine max
  Clone ID: 701068227H1
atcgactctttctcttcaccctttgaagggacttcttttgaggacacttttggtggtgctggtggcgatgccatgacgaaaacaaccaccgccgatgacggtgccagatgaaacaataatgaagccctgacaagagatttcttgggtcttagacctctctctcacactgatatcctcaacattgctggtatgggaagttgcatcaactcctcccaacataaccaaaccccaaacccttggcaaggaaaggttgcagagacagct

SEQ ID NO: 14027 - DNA, 237 bp, Glycine max
  Clone ID: 701068228H1
gccttaaaggaggtcaagtgctaagtgacttaatgtaccgagctatctactcattttatctagtttttttttacgttctgtcctaagttacttgaaactttgacctggtattttgattttaatggtgagacgtgtgctactgctacatcataattcccatcaaatttaattatcgatgggttagaatttcattaatttatgattttggtcgtgctagattcccggaagtttcttttg

SEQ ID NO: 14028 - DNA, 266 bp, Glycine max
  Clone ID: 701068230H1
caaaattgaacaagaagtcctgagaaggcatctagaacaaagctctgaatctgattttgaaaactggaacgcgtaaaatgaacggtacccctccctcataaataaaatctactactaaacgctcttctcttctgcaatcaatttgcaaaccaaacacaacacaaggagaagaaccagatctctctttctcaaatcaccaagaatagttgaaaatggggctgtctttcacgaagctgttcagccggctctttgcgaagaaggagatg

SEQ ID NO: 14029 - DNA, 263 bp, Glycine max
  Clone ID: 701068231H1
gcaatggcggaagacgtgactcgggtgatggtggcggtgaacgagtcgagcattaagggataccctcatccttcgatcagcagcaaaggggctttcgactggaccatcaacaagatcgttcgcgacaacgtctctgccttcaaccttctttttcttcacgttcaagtccccgatgaagatggttttgatgacatggatagtatctttgcttctcctgacgattttaagaacatgaatcagagagatagaattagaggagttca

SEQ ID NO: 14030 - DNA, 269 bp, Glycine max
  Clone ID: 701068232H1
gcgactcacactggtcttcgcttctcattcatcatttctcacctaaccttctcttcctctcagtctcagatcagaaacctcagccagccatggcagcgttccagaagatcaaggtcgacaaccccatcgtcgagatggacggagatgaaatgactagggttatctggaagtcaatcaaggacaagctcattttgcccttcttggagttggacatcaagtattatgacttaggccttccttaccgtgatgagaccgatgataaagttaca

SEQ ID NO: 14031 - DNA, 282 bp, Glycine max
  Clone ID: 701068233H1
attttcaattcatggcttccctcatgagcaccatcctcaagcaaatgtcttgttcttcttcttcaaatgctgggacgatgttgttctccacaacaacagcagacattgttgattccccttcacttgctcagagaatcagagatttgcctaaggaccttcctggaaccaacatcaagaagtctgtttctcagctcattgggaggactccactggtttatcttaacaacatcaccgaacgatgtggagcttatgttgctgtcaagcaagagatgatgcaaccta

SEQ ID NO: 14032 - DNA, 276 bp, Glycine max
  Clone ID: 701068235H1
gagagcgtcctagtcgcaaccctaataagaagaaccacagcttcaagcgagtgacatccaccagccatgggtcgtatgcacagccgcggtaagggtatatcctcttctgctttgccctacaaaaggacaccccctagctggctcaagatctcttcgcaagatgtggaagaaaatatctgcaagtttgcgaagaagggtttgaccccgtctcagattggtgtcattcttcgagattctcacggtattgctcaggtcaacagcgtcactggcagcaaa

SEQ ID NO: 14033 - DNA, 272 bp, Glycine max
  Clone ID: 701068236H1
cattgcaaagaaaatacacattacattactaagtctttgttcatttgagtagtagtgatggctagcctcaaggttgcatgtgtggttgctgtgatgtgcatggttgtggtggccatgagtgctgcacccatggcacaggccgcaatcacgtgcgggcaggtcgccggcgacatgtctccgtgcttcagttatcttcgaagcggcggaaaaccgtcgcaggcctgctgcaacggagtgaagtccctcagcagcgcggcgaagaccaccgcgga

SEQ ID NO: 14034 - DNA, 266 bp, Glycine max
  Clone ID: 701068238H1
cagtgttgcactgccatcaatgtccaccaccatttcttctcttcccttctctctccccattcgccaaaactctagggttacccttttcaatccaccctcttctcctaatccatcccaatcatcagtcacctttcctaaaacacaatggagacttttgtggtttaggcatggaaacacttcatcaaaaactgatggttctgagctcaatgaagataaattgtcagaagatttggtgaagctcgaaggtgtccagtccaaagacctga

SEQ ID NO: 14035 - DNA, 190 bp, Glycine max
  Clone ID: 701068239H1
agtctgcaacgtcgctatgtcgaactacaccgccaaacccctcgaccagcacgccaacacgggcttcgaccctacagcgccagggttcacatcgtgtacaccgagagaccacagaacgaggaggctgaggcctaccacatcagaagcctcacttcagtccttggcagtgaggaggctgcaaaggaagctt

SEQ ID NO: 14036 - DNA, 268 bp, Glycine max
  Clone ID: 701068240H1
ctataagctagtttatcgtgaggagaatatgaagttgtttgtctactttgttgctgcagtagttttggtagcatggccatgccatggcgcaggctaccaaaggttccctctccgaatgaaaactggctatggtgagcgttcttcggaggtaaaatgcgcaagtcttaggcttgctgtggaagcacacaacatccgagcctttaaaaccattcctgaagagtgcgttgaaccaacaaaggactacattaatggcgaacaatttagatca

SEQ ID NO: 14037 - DNA, 265 bp, Glycine max
  Clone ID: 701068241H1
atttccattgcatgcaaagcaaatacgcattatattactagttttaatttgttttgtcgtttgcttctttctttgattaatgatgactagctttaaggttgcatgtgtggttgcgatgatgtgcatggttgttcgccatgagtgttacacccatggcacaggccgcaatcacgtgcgggcaggtcgccggcgacgtgtctccgtgcctcagttatcttcgaagcggcggaaaaccgtcggacgcctgctgcaacggagtgaagtc

SEQ ID NO: 14038 - DNA, 266 bp, Glycine max
  Clone ID: 701068242H1
actttttctctctactctcatttcctttcctccaagaactctattttccatgcccccttcaaaggaaacaacaacaccaagcaattcactttttccaaagccgcaaatctcttgccgttgcagccacggttaaatgtctgcttttcttcttcaaaggatgcaggctccagtgacaacacaccgagcaacttttgcattattgaggggccagagacggttgaggattttatgcagatgcagctgcaggaaattcaagacaacataaa

SEQ ID NO: 14039 - DNA, 263 bp, Glycine max
  Clone ID: 701068243H1
ctggccaacaatgccagtacccaactcgagtgggaagattacttcttccaccttgctttccctgaggacaagcgtgacctctccttctggccaaagaaacccgctgattatattgaggtcacaagcgagtatgcaaagcgactgagggggcttgcgaccaagatattggaggcactctctattggattggggttggaaggacggaggttggagaaggaagttggtgggatggaagagcttctacttcaattgaagatcaacta

SEQ ID NO: 14040 - DNA, 261 bp, Glycine max
  Clone ID: 701068244H1
gtctgggtatcaatcttgctacagcagatactgttataatatttgattctgattggaatcctcaaaatgacctgcaggcaatgagtagagctcatagaattggacaacaagaagttgttaacatttatagatttgtgacaagcaaaagtgttgaggaagatattttggaacgtgctaagaagaaaatggttctggaccacttggtgattcaaaagctaaatgcagagggtaggctggagaagaaagaagccaaaaaaggag

SEQ ID NO: 14041 - DNA, 261 bp, Glycine max
  unsure at all n locations
  Clone ID: 701068245H1
aacgcaccccctcttttagcgttcgaacaaaattagggttttctcaaccctagggtttaccttctcttcccctgttcgaaattaggcaaatcaaaacagaaacacgactacaaaaagaagaaaagaagaaaaagaatcaatcattcattgatcgctgaaacgatacgatgacagggaaggcgaacganagaagcacacggcgaaggagatcgcggcgaaggtggacgcggcgaccacgaaccgcggcggcgggaaggcggg

SEQ ID NO: 14042 - DNA, 262 bp, Glycine max
  Clone ID: 701068247H1
gctgtggaagcacacaacatctttggctttgagaccattcctgaagagtgcgttgaagcaacaaaggaatacatccatggcgaacaatatagatcagactccaaaacagttaaccaacaagcttacttttatgccagagacctcgaagtccatcccaaggacacatttgtgttcagtatagatggcaccgtactctctaatattccatactacaaaaaacatggatatggggtggagaaatttaactcgaccttgtatgatg

SEQ ID NO: 14043 - DNA, 240 bp, Glycine max
  Clone ID: 701068248H1
ctctcgcactcgtatcttgtagcaatggcgagcgctcccactccacgcgaagagttcgtgtacatggcgaagtggcggacaggccgagcgctacgaggagatggtggagttcatggagaaggtctccgcctccgccgagagcgaggagctgaccgtgctcgagcgtaacctcctctccgtcgcctacaagaacgtgatcggcgctcgccgcgcctcctggcgcatcatccctcaatcgag

SEQ ID NO: 14044 - DNA, 272 bp, Glycine max
  Clone ID: 701068249H1
caggaccaaacagcatccgctgcacgacggtaaccctccaacaacaacacttccgctgcgaaaaatgtctctggtggcgaacgaggatttccagcacattctgcgtgtgctgaacaccaacgtggatgggaagcagaagataatgttcgcaatgacctccatcaagggtattggaaggagattcgccaacatcgcttgcaagaaggctgatgttgacatgaacaaaagggctggtgagttgactgctgctgagtacgatagtgtgatgactg

SEQ ID NO: 14045 - DNA, 273 bp, Glycine max
  Clone ID: 701068250H1
ctcatctttcaatttcaatcaacggttatacccttttctatttgagcatcatcatgtccaccgcagcgcacccaaggccaagaaaacggcgtcgtccaagaagcccctctcccatcctaccttcgccgcgatgatagcggaggcgatagcgagtctgaaggagagaaccggttcgagccaatacgcgataaccaaattcatcgaaggcaagcacaaggagttgcctccaacctacaagaagcttgttctcgttcatctcaagaagtctgttgc

SEQ ID NO: 14046 - DNA, 270 bp, Glycine max
  Clone ID: 701068251H1
ggaggattagagtaagaattgctcgcaagataaatgatgatgaagatgccaaggaagagctgtactctcttgttaccgttgttgagatccctaaggacgagctcaaagggttaggcactaaggttattgatgacgaggattgatttatatctgtttgaaacccggagacatacatgtagctttttgtttctgcaaccgagtcttgtttttccagatttatcaaattactcctaattttgttgggttacttcgaattttgttgagacgtaa

SEQ ID NO: 14047 - DNA, 267 bp, Glycine max
  Clone ID: 701068252H1
tcgagataactagaaacagtgtgatgaaaatgaaggtccttgttttcttcgttgctacaattttgcgtagcatggcaatgccatgcgtacgatatgttccctctccgaatgaacactggctatggtgcccgtactccggaggtgaaatgcgcaagttggaggcttgctgtggaagcacacaacatctttggctttgagaccattcctgaacagtgcgttgaagcaacaaaggaatacatccatggcgaacaatatagatcagactcc

SEQ ID NO: 14048 - DNA, 267 bp, Glycine max
  Clone ID: 701068254H1
gcgcaaagctgaagtgtctgcttcttccgattccggcacgcccccatcaccatggtgaacgttccgaaaacaaagaagacatactgcaagagtaaggactgcaggaagcacaccctgcacaaggttacccaatacaagaagggtaaagatagcattgctgcccaaggaaaacgccgttacgatcgcaaacaatctggttatggcggacaaactaagcccgtcttccacaagaaggctaagaccaccaagaagattgttctgaggttg

SEQ ID NO: 14049 - DNA, 267 bp, Glycine max
  Clone ID: 701068255H1
ttctcttcaacctaacgcacaatctttatactcttcattccatggctttgcccaatcagcaaaccgtggattaccctagtttcaaactcgttatcgtcggtgatggtggcacaggaaagacaacctttgtgaaaaggcatctcaccggagaattcgagcagaaatatgagccaaccatcggtgtggaggttcacccattggattttttcacaaactgtggaaagattcgattctactgctgggatactgctggacaggagaagtttt

SEQ ID NO: 14050 - DNA, 261 bp, Glycine max
  Clone ID: 701068257H1
cacacgttttccttgttccgtggtggcacacactataatctcatggcaaaggaaaacatgctcaaaacgcctccaaaagttccaattcaaccacaaacacccgaacctgaatgcaaaacaccagctccagttcaacaacaagaccccaatgatcataataactcctcaaatgaattgcacaaacctgttaccccaaatcgtcttagagtccccaaggctttcaaatacccagaaagatatacaagtccaactgatttgata

SEQ ID NO: 14051 - DNA, 259 bp, Glycine max
  Clone ID: 701068258H1
acgaagatgtcgaagagaggacgcggtggttcggcggggaacaagttccggatgtcgctgggtctgccggtggcggcgacggtgaactgcgccgacaatacgggggcgaagaacctctacatcatatcggtgaaagggatcaaagggcgtttgaaccgtctcccctcggcttgcgttggcgacatggtgatggccaccgtgaagaaggggaaacccgatctgaggaagaaggttttgccagctgtcattgttcgccagc

SEQ ID NO: 14052 - DNA, 257 bp, Glycine max
  Clone ID: 701068260H1
ctcgagccggcattgcatccctcttgatttgtagtttgttttgtgctttagataaaagttctcccaaatcaagaggggttttaagatcatagtgtgtgttttgcaacaatggctaagttctttgctgctatgatcttggcactctttgccatttccatacttcaaacagtggtaatggctgctaatgaacaaggaggccacttgtatgacaacaagagcaaatatggaagtggaagtgtcaagagttaccaatgccc

SEQ ID NO: 14053 - DNA, 259 bp, Glycine max
  Clone ID: 701068261H1
cgcgagggattgcgctgcgtctcttcctcttctctttacattcatccctcattcataatcttccaatccaacaacctcagcctcacactcacacatacacacatctgaacgcgtatcgtccctcccatggcttcaaagcgcatcctcaaggagctcaaggacttgcagaaagacccaccaacttcttgcagcgctggtccagtagctgaggacatgttccattggcaagcaacgattatgggtcctgctgatagtcctt

SEQ ID NO: 14054 - DNA, 261 bp, Glycine max
  Clone ID: 701068263H1
tctattttaccaaacaattcaaactctattattcagtaaaaaagaaaggaaacctccgcaatcaatgaagtggccaagttcttcaatagtaaattgaaagaagttgtgagttcaactcagaaaagaacttcctttggctgccatcacttatgttgatgtttactcggtgaagtactctctcattagtcaaccaaagaagcatggttttgaggagccattaatagcatgttgtgggcatcgtgggaagtacaactacaattt

SEQ ID NO: 14055 - DNA, 263 bp, Glycine max
  Clone ID: 701068264H1
tgttgatcgagataactagaaacagtgtgatgaaaatgaaggtccttgttttcttcgttgctacaatcttggtagcatggcaatgccatgcgtacgatatgttccctctccgaatgaacactggctatggtgcccgtactccggaggtgaaatgcgcaagttggaggcttgctgtggaagcacacaacatcttcggctttgagaccattcctgaagagtgcgttgaagcaacaaaggaatacatccatggcgaacaatataga

SEQ ID NO: 14056 - DNA, 266 bp, Glycine max
  Clone ID: 701068265H1
aactagaaacagtgtgatgaaaatgaaggtcgttgttttcttcgttgctagaattttcgtagcatggcaatgccatgcgtacgatatgttccctctccgaatgaacactggctatggtgcccgtactacggacgtgaaatgcgcaagttggaggcttgctgtggaagcacacaacatctttggctttgagaccattcgtgaagagaccgttgaagcaacaaaggaatacatccatggcgaacaatatagatcagactccaaaacag

SEQ ID NO: 14057 - DNA, 265 bp, Glycine max
  unsure at all n locations
  Clone ID: 701068266H1
tgccaagttcagtttccgggcaacatcaatttccgncgtcgcggttccgccaccttccaaaaagcaacggctgctctcagccatgacatcatgactgaagaaaccagcagcagcagctcacattccaccagtggatccaccggcgaaacggcggaggaaacgacgaactcgacctgaaacaaattgaatggtttctaggtttggagaatgagctgcctgttagcaacaacattggtgctgagtgggacaacatggatgactgtgg

SEQ ID NO: 14058 - DNA, 218 bp, Glycine max
  Clone ID: 701068267H1
gttacttaatttaaagttgttgctacttgctagtatccaatattagcttactactagggtgtttgaaagagctggggaagacaggcaaatggattaggcacttgttgacaggtgagaaagacaaggaaagacagaagggaaaatctacaaccaagcctgaattgttgttcagatagaacaggagactcaagcagtccgacttgcacaaacccaaagga

SEQ ID NO: 14059 - DNA, 264 bp, Glycine max
  Clone ID: 701068269H1
ggtgtcatctcttcctgtttggattgtttcctttatggtggtaatctatacatctttgaatatggggtttcacctgcattttttctagccaaagctcgaggaggcacctgcactcttgctccttctgatccaactgaagatgtccttcatcgttcttcatttcttcttgaaaatgggtttggtgtctacaacattttcaagaataactgtgaagactttgctcatttactgcaaaacaggtcttcttgtatccacaagtgtcag

SEQ ID NO: 14060 - DNA, 260 bp, Glycine max
  Clone ID: 701068270H1
ctcggggcttttagtctttggggtggtggctttctctaccaatggggcgttattgattattctggcggctatgtcatacacctttcttctggaatcgctggcttcactgctgcttactgggttggaccaaggttgaagagtgatagggagaggttcccaccaaacaatgtgcttctcatgcttgctggtgctgggttgttgtggatggggtggtcagggttcaacggtggagcaccatatgctgcaaacattgcatcttc

SEQ ID NO: 14061 - DNA, 263 bp, Glycine max
  Clone ID: 701068272H1
ttggactcttgttgacaacacacttgaaggcaaacaaacagctgtggacagaggacttccatggtggggtcctttccagaataggaagggagatgttagaaatgatgagttttaccgtcttcctctccggataaatgagtacatgcccaccagatttctctaaagtactctaatatatgctacctgtacttaaccccttctgcgaacttaattaaattctcatgtacaatgaaatgaccctgtaaaatatggatagacaaatt

SEQ ID NO: 14062 - DNA, 259 bp, Glycine max
  Clone ID: 701068273H1
actcagccatattctatctccacgccgctaactctctctcacactcagtctctgtgtctctctctctttcacacccttcactttactctctctctctgacagctaaaatgcaaggaggaatgagatcatttttgtcacatgggaatgtcattagaaatgctgttctacaacgcgtgcgcatggtgaaccccctgctacagacaattgcctcttcgcggtttgaatctgttacgcctgctcgcattgaggagcatggttt

SEQ ID NO: 14063 - DNA, 257 bp, Glycine max
  Clone ID: 701068274H1
atagactcttccttttctcttctctgtctaaggggtgccctgagatcacattgaacaatggtgaaggctgtggccgttcttggcagcagtgagggtgtcactggaactattcacttcgttcaggagggaagtggtccaaccaccgtaactggatctcttgctggtcttaagcctggtctccatggtttccatgtccatgccttgggggacactaccaatggttgcctctcaactggatcacatttcactctaataac

SEQ ID NO: 14064 - DNA, 254 bp, Glycine max
  Clone ID: 701068275H1
caaaggaaatgattgatctttgaaaatgcagggaggaaagaaagctggagagtccatcaaggaaacagctgcaaacattggcgcttctgccaaggctggcatggagaaaaccaaggccactgtccaggagaaggcagaaagaatgacggcacgtgatccgatgcaaaaggagttggcaacccagaagaaagaggcaaagatgagccaggcagagctggacaagcaggcggcgcgtcagcataacacggcggcga

SEQ ID NO: 14065 - DNA, 251 bp, Glycine max
  Clone ID: 701068276H1
accgagggttaaacatttagcatatttgctgagggggtacctttgtagacactacatactatccataatatggtcgaaaacaatccagcaagggtttttggttcttctatgtttctatgtttgcttgtgttgatcacttggaacaacattgttgttgttgttccacaagctgaggctcgtgcattctttgtatttggtgattcgctagttgacaatggcaacaatcactacctattcaccactgctcgtgc

SEQ ID NO: 14066 - DNA, 257 bp, Glycine max
  Clone ID: 701068277H1
gtgcggcgatcctagcactctcttctgcagctttcaccgacagcttcattcaccatggctgagcaaaccgagaaggcttttttgaaacaaccaaaagtgtttctcagctcgaagaaaactgggaagggaaagacacccggaaagggtgggaaccgcttttggaaatccattgggcttggatttaagactcccagggaagccatcgaaggaacctacattgacaagaagtgccccttcactggcaatgtttccatccg

SEQ ID NO: 14067 - DNA, 257 bp, Glycine max
  Clone ID: 701068280H1
gataactagaaacagtgtgatgaaaatgaaggtccttgttttcttcgttgctacaattttggtagcatggcaatgccatgcgtacgatatgttccctctccgaatgaacactggctatggtgcccgtactccggaggtgaaatgcgcaagttggaggcttgctgtggaagcacaccacatctttggctttgagaccattcctgaagagtgcgttgaagcaacaaaggaatacatccatggcgaacaatatagatcag

SEQ ID NO: 14068 - DNA, 101 bp, Glycine max
  unsure at all n locations
  Clone ID: 701068282H1
ctnataatttgttgtttgtattcttggatctaaagcttgtatttaatcatcaatttcaatatattaaccctaaaatgtgaaattagtcattgggttatatc

SEQ ID NO: 14069 - DNA, 263 bp, Glycine max
  Clone ID: 701068283H1
cattcagagcaccctgagatctctgcttcagagttcagaggaattcgttttctctgctcgggatctggaagggaagcgaatcgacatgggtttcttggtgacgacgctgatcttcgtagtgatcggaatcatcgcgtgcctctgcaccagaatttgctgcaacagaggacgttctgccaatctatttcaccttactttggtaattactgcaacaatttgctgctggatgatgtgggcgattgtatatctggcacagatgaaac

SEQ ID NO: 14070 - DNA, 261 bp, Glycine max
  Clone ID: 701068284H1
ctccaaaatgcatcgtggaattggtttcatcacttttgcaagtgcagattctgtggagaatttgatgtcagaaacccatgaactgggaggttctgctgtggtggttgatcgagctactcctaaggatgatgactttaagccaatgggcagaatgccgccgccgccaccgccaccgccacaaggaggaggatatggtgcatacaatgcttatatctcagcagccactagatatgcagcacttggtgctcctactttgtatga

SEQ ID NO: 14071 - DNA, 261 bp, Glycine max
  Clone ID: 701068285H1
cgcacaagtcgtgggttggccaccagttaggtcatttagaaagaacatagttcaaaggaacaagaatgaagaggaagcagctttcgtgaaggtgagcatggatggtgcaccgtatctacgaaaggtggacataaagttgtacaagagctaccaggagctgtcagatgcgctggctaagatgttcagttccttcacgattgaaaaatgtgggtcccaagggatgaaggactttatgaatgagaccagattgatagacctttt

SEQ ID NO: 14072 - DNA, 275 bp, Glycine max
  Clone ID: 701068286H1
ctcgagccgtcttcttccacaaaaccatggctgaaaaggtgaccatcatgaaactcaaggttgaccttgagtgtgagaaatgctacaagaaggttaagaaacttctcggcaagtaccctcagaaattcgggaccagaagttcgatgagaaggaaaacattgtgttcatcacactggtgtgttgtagccccgagaagataagagacaagctttgctacaaaggtggaggctctatcaagagcattgagatactggaactgcccaagcccaaggccg

SEQ ID NO: 14073 - DNA, 266 bp, Glycine max
  unsure at all n locations
  Clone ID: 701068287H1
ttncgagccggcggttacatttgggctgtttttggcgaggaagttgtcgttgcccagggcgattttctacattgtaatgcaatgcttgggtgctatttgtggcgctggcgtggtgaagggtttcgaggggaaaacaaaatacggtacgttgaatggtggtgccaactttgttgcccctggttacaccaagggtgatggtcttggtgctgagattgttggcactttcgtccttgtttacaccgttttctgccgccacgatgccaaac

SEQ ID NO: 14074 - DNA, 139 bp, Glycine max
  Clone ID: 701068288H1
gaggaggtaaagaagattgttactactttgaatgaggctaaagtccctggagaagatgtcgtagaagttgttgtgagccctccttttgtgttccttcctgttgtaaaaagtttgctgcgccctgatttccatgtttcgg

SEQ ID NO: 14075 - DNA, 257 bp, Glycine max
  Clone ID: 701068289H1
atcacttactggaagccttgttgtgagtaagagaaaaggcttcctgcaccgagcacaccaacttgatacctctgattctttctttgcttagaattccacagaatatggagattcttcacttcaatcactccccacctttggaattcaagggtttgagcaaggaggaggaagactcattgctagggcaagtggaaatatggaggtacatgacatgcttcacggactccgtggccttgaaagctgtcatagagcttcgt

SEQ ID NO: 14076 - DNA, 256 bp, Glycine max
  Clone ID: 701068290H1
cttctgaatccaccgccaccgcagcgtggacggaatcagagtgcagcacatagcagcagcagcagcagcagcagcagcagtcattgaagtgctgctctagtttgaggcacaatgagattggagaaatgctggttttgctcttcaaccgtataccctggacatggaatccagtttgttcgtaatgatgcaaagatttttcggttttgtagatcaaaatgccacaagaactttaaaatgaagagaatcctcgtaaggt

SEQ ID NO: 14077 - DNA, 137 bp, Glycine max
  Clone ID: 701068291H1
cgttgttgttctaaagcactcatccacacattctccgtcgccacgacaacaatggctccaaagaaaggtgcgaaaggtggagttgtagcagcaaagaagaaggttcaggagaaggtaacgaaccctttgttcgagaa

SEQ ID NO: 14078 - DNA, 253 bp, Glycine max
  Clone ID: 701068292H1
tctgattcagaaactcttaggcattccacattctcaaccccacgccctaagagcagagcgaaaatgacaaccaccttcgcgaccgtcgcaggactcggtggcgcattactgtcatccacctcatctcgtctcacctcagggtttgtgaaatccccagtgattgctaggaatcccttgaggcaagctgtggcaatgggaaatgggaggattacatgctttgagaggaattggctgcgggcagattacagtgtga

SEQ ID NO: 14079 - DNA, 253 bp, Glycine max
  Clone ID: 701068293H1
actgatcataaatcacatagctagttgtttaaagtgagataaaaagaaagaagaaaatggcaaactttccagttgttgacatggggaaacttaacaccgaagagagagcagcagccatggagattataaaagatgcctgtgagaactggggtttctttgagttggtgaaccatgggatatccattgagttgatggacactgtggagaggctcacaaaagagcactacaagaagactatggagcaaaggttcaa

SEQ ID NO: 14080 - DNA, 254 bp, Glycine max
  Clone ID: 701068294H1
catcctgcatgcaagctttagaacaccgaacttgaaagctcgtctaaacacattccgtgaagaatttcgtgcagtatggcgtaattatagtgagctgtagcttacataaaatttgttggacttggatgtgctgctgctttattgttgaagtattttccattaattggaatggaacattctatagcaagctgccggccattggagactaccagcagattgtaaattttcaggaatcttgtttttgtaaagtacac

SEQ ID NO: 14081 - DNA, 175 bp, Glycine max
  Clone ID: 701068295H1
atcaatttgagtaggaattgtgggtctgtggatcattttacttagttaatggtatttgtgtatgctacaatgtgtctttggggttgtattattgacatttttttacgtggatttgaggatttaaaattaatcattatgaggtgttttactcctaaaaaaaaaaaaaaaaaaggag

SEQ ID NO: 14082 - DNA, 268 bp, Glycine max
  Clone ID: 701068301H1
ctttgtttcataggctcctttttgattacgaaaatgtggaagagaccgggttttgaagaagaagcagttcaattgatcaactcagatttcagggacctaagtctagctgctaatagactcgcccatcatgccatcaaacttggtggcattggctttggagcctcttttttcggattgtttgctgccattgctgctatttatctgttgattttggatcgtacaaactggaaaacaaatattctcacagcactactcattccatacattt

SEQ ID NO: 14083 - DNA, 273 bp, Glycine max
  Clone ID: 701068302H1
ggagctccacccgaagtggtggcgcgtatggctgcggctaagcaagagtttgacgcacggcaaagatcttcagttggttcaagggaaacttcaaaagaccctgaacttgaccaattcatggaagcatactatgacatgcttgtgaagtatagagaggaattaacaaggcctattcaagaggctatggatttcatgcgacggatagaaactcagctaaatatgctatgcgatggaaccgtgcggatcttctctgatgagaaatgtgaaggtgcc

SEQ ID NO: 14084 - DNA, 275 bp, Glycine max
  Clone ID: 701068303H1
ctcctttctctgtctccatcgtttcgcattgcacaagcactctctctttcccttaccctttttcaggtttcaacgctccaactatccatggcaaaccgctggctcagacccgaggtgtatccactgttcgctgcggttggtgctgctgttgggatctgtggattccaactggttcgtaatatctgcatcaaccctgaagtcagggtgaacaaggagggaaggaaggcaggagttttggagaactttgctgagggagagaagtatgccgagcactt

SEQ ID NO: 14085 - DNA, 277 bp, Glycine max
  Clone ID: 701068304H1
ctcatcctcacagacattcaaacatgaaatttttttggtttcttcaagtcctgttcttcctggctatgcttctcatcaatccctctgttgctcccaatgcaccagctcctccttcaagtggtgacccgcatacagaaacactccggccaccgccacgcaaggtctctggttcatggccatgaagaatttattgataagcttatatatatataaagtttggttcttcaatatatatgtagtatctcttttcttctaaactttttctgcttgtgatcac

SEQ ID NO: 14086 - DNA, 277 bp, Glycine max
  Clone ID: 701068306H1
caaggagggaatcccccagaccagcagaggctgatcttcgccgggaagcagctcgaggacggacgcacccttgctgactacaacatccagaaggagtcaactctccacttggtgttgcgtcttcgtggtggtatgcagattttcgtgaagactcttacgggtaagactattaccctcgaggtggagagctctgacaccattgacaatgtgaaggccaagattcaggacaaggaaggcatcccaccggaccagcagaggctgatttttgctggcaagc

SEQ ID NO: 14087 - DNA, 269 bp, Glycine max
  Clone ID: 701068307H1
attaacactaataacagcaaactaaaggtgaagtttgccagaaacaagatgggaaggaaccattttcagcagcaacactgtgctgatgggagcatgtggatggagagtcagggtcagcaacagagctatgccttccaagaagagtcttggagccctgataacaactatggccacaaccacaagcaattcccaggcatgcacatgaacatgaacaacaacaacaacaacaagaggcttggtgcttctgctgctgtggactctgacttctc

SEQ ID NO: 14088 - DNA, 281 bp, Glycine max
  Clone ID: 701068308H1
caaaaaccaagtactacaagggaagaagaacttagctacaagctaaggaaggatcaaagagaatggctcaagcaatggcatcaatgactagcttacgtggttcctctcaggctgtgttggaaggtagccttggctccacacgcttgaatgtggggagtggaagcagggtggcctcagtcacacgtgcagggttcacagttagagcacagcaacaacaagtgaatggtggtgaggtacaaagtagccgtagggcagtgctttcacttgttgctgctggtttg

SEQ ID NO: 14089 - DNA, 282 bp, Glycine max
  Clone ID: 701068309H1
tctcgagccgctcgagccgattcggctcgagaagaaggcattagaagctttcaaaaggtttggcagcaaacaccctggaattgaaggaaaaatcaatgcacggaacagtgatccaagtctgagaaaccggactgggccagttcagctgccatacactttgctccatcgttcaagtgaggaagggttgactttcaaaggaattcccaacagtatctctatctaattaaaaagagtttgtggtttccttatctatgttgtacttctgaataacatagactttat

SEQ ID NO: 14090 - DNA, 277 bp, Glycine max
  Clone ID: 701068310H1
gtcttcataaacgcctttcttctccgtttccgtttcctcgttcgaattcgctttttgatctgcgaaaatgagagagtgcatctcgatccacattggtcaggctggtatccaggtcggaaatgcttgctgggagctctactgcctcgagcacggcatcgggcccgatgggcaaatgccaagtgacaagacagttggcggtggtgatgatgctttcaatactttcttcagcgagactggtgctggaaagcacgtgccacgtgcagtgtttgtagatctt

SEQ ID NO: 14091 - DNA, 278 bp, Glycine max
  Clone ID: 701068311H1
gacctcagagcagtagatggcttccacttccatagttccattccagctcttaacaattacatgagacagagaaagggttgacggacagagaacccaccttttgttgtattgcagatccatccgctctgccaccaggtgaatggaaggaagtggcggtggcggtgcttcaccgtctgcaccggtgaagcagtatttgcacgatttctcgaagctgtttcagtactatctggataaatccactccacattccacgtacagatggattgggactttcgtga

SEQ ID NO: 14092 - DNA, 279 bp, Glycine max
  Clone ID: 701068312H1
ctactttctctctctttgtaactcgtaagcatggagtcctcaaagctctatgcttacctcttcctttgcatgctcttcctctcctccgccactcccattctcggttgtggctactgtggcaaaccccccaaaaagcacaagcctggtaaaacaccaaagacacccacagtacccgttgttaagccaccagtcacaatccctcccattgttaagccaccagtcacaatccctcccattgttaatccaccagtcacaatccctcccattgttaatccacca

SEQ ID NO: 14093 - DNA, 279 bp, Glycine max
  Clone ID: 701068313H1
ggcgttctatatattattgaattgacaatgaggcctgctcttgctttgcttcctcttctatttgctttcttgttagctgccactacggaatcaagaaaagatccacgggaatattggaaaatgatcatgaaagatcaggaaatgccagaaggacttcaaggtcttgtttcatttcaatctgaaaataaccctaagactcaagagcagcttggtaaaggttccaaaaaccattgtgaagagtctctagttacaaatacacaagttaacagtgacttcgaa

SEQ ID NO: 14094 - DNA, 165 bp, Glycine max
  Clone ID: 701068316H1
gtatctctttctctctccatttttatttatatatttctctccattatttggtgtgcatgctctagacacacacacaccccaccaccaccaacactgagttttagcagaaggatagagagcagaatgattcaaagaactgtgtccttgtcccagttgtaaggaaat

SEQ ID NO: 14095 - DNA, 287 bp, Glycine max
  Clone ID: 701068317H1
cggttcgagctgaaagtggaaaatgcaaccctatgaaagcagttcacggatgctagccaacattttcgtgaggcagatacgaataaccgagtgctgaaatcagatgtagaagctttgagagccaaggtgaagttagcagaggatatggtgactaggagctcttttactacgttaaacaatcagcttcttcagacacaacatcatcaaatgagcacaccccagcaactgaacacgactaatctgcggcgcatggcgcatgtttcgccaacaatcaccgttcacggaaa

SEQ ID NO: 14096 - DNA, 277 bp, Glycine max
  Clone ID: 701068318H1
agcactcatcattcttcgtttgtctaagatccgccttctctgaattgtaaaactgtcgctcggagaaactgcttgttcatacgcagctctcatccttcatgaagatggaatcagtgtaactgccgacaagatcagcaccttgttggaaactgcaaaggttcaagtagatacctattggccaaccttatttgctaaacttgctgagaagaaaaatcttggcgatttgatagccaatgcagcaggcggtggtgcaccagttgctgttgcagctgcccct

SEQ ID NO: 14097 - DNA, 107 bp, Glycine max
  unsure at all n locations
  Clone ID: 701068319H1
gcctcagtaatctgagagagaaacaaaaacaatgaaggtttccattgccaagttccactcccttcccctaccacncntccttctcttggccttcaacacaaaacccc

SEQ ID NO: 14098 - DNA, 275 bp, Glycine max
  Clone ID: 701068320H1
gctcattcatctttggtgagtggcgacataaataagcatttgcctacgttgttcgtgttggatgcttcccacctctcattgattggattaagcgccaaagtttccgaatttgcataatggtattgctagttgggcttacattgcttttgggtctcttcctcgctgttcttctattcaacccacgacaccgcaaatctgggcataaggcaaaagctcaagccagtttaaacgttgataaggcatcaaaatcctacagtaaaacagaagtttcgttg

SEQ ID NO: 14099 - DNA, 278 bp, Glycine max
  Clone ID: 701068321H1
ctcacttctcaaattgaatcgaacgaattcacaaaccctagttttcgaggatgggtcagatccagtactccgagaagtacttcgatgacacttacgaatatagacatgtggttcttcctcctgaagtcgcaaaactgcttcccaagaatcgtcttctctccgaaaatgagtggcgggcaattggggttcagcagagccgtggctgggttcattatgcaattcatcgccctgagccacacataatgctcttcaggaggcctttgaattatcagcagcag

SEQ ID NO: 14100 - DNA, 266 bp, Glycine max
  Clone ID: 701068322H1
ggtgaatgcgtagaaaaggaaaataaagaaattagcgcgaaaaatgttgggtgtgttcagcagctccatagtgtcgccgccggaggagctcgttgccgccggcagccgtacaccgtcgccgaagatgacggcggcggcgctgcggaagtggttcgaggacaagaacccctccgcagtgtcggtggaggtcggagagcatgtccagctcgcttatacccaccagaacgagtcgccgtaccagcccagatcctttgctgtgaaggatg

SEQ ID NO: 14101 - DNA, 280 bp, Glycine max
  Clone ID: 701068323H1
gagtaaattaactatgaagcctaccctactattatccctttccttcctgcctctctttgctttcctggctctttcagaagatgttgaacaagttgtggacataagtggcaaccccattttcccaggtggcacatattacattatgccatcaacttggggcgctgccggtggtggattgaaactaggccggacaggaaactcaaactgcccagttactgttttgcaagattactcagaaatcttccgtggcacaccagtcaaattcagcatacctgggata

SEQ ID NO: 14102 - DNA, 279 bp, Glycine max
  Clone ID: 701068325H1
aatgtcactccaaatcaaccaactccaaaggatcctttatggctatccaatagtgacctaatcgggttccaaggttatgtacccactctttacgtttacaaagcaaaacccaattatagcaacaacataattgagaggttgagaaactctcttagcaagcttttggtgtactactatcctgttgctggcagattgagcttgacaaaaagtggtcgaatggaagtggattgtaacgctaagggagtgacattgattgaagcagaaaccacaaacacattt

SEQ ID NO: 14103 - DNA, 279 bp, Glycine max
  Clone ID: 701068326H1
tagaaacagtgtgatgaaaatgaaggtccttgtcttcttcgttgctacaattttcgtagcatggcaatgccatgcgtacgatatgttccctctccgaatgaacactggctatggtgcccgtactccggaggtgaaatgcgcaagttggaggcttgctgtggcagcacacaacatctttggctttgagaccattcctgaagagtgcgttgaagcaacaaaggaatacatccatggcgaacaatatagatcagactccaaaacagttaaccaacaagctta

SEQ ID NO: 14104 - DNA, 280 bp, Glycine max
  Clone ID: 701068327H1
cccaaacacatcctttctctctctaactttcccactctctttatccagcaaccaagctcgttgaagacaagcgcgtcaaaacgctcattattcacagcagaagaagaagaagaagaagaaccaaacaaacaaggaacatagaaacccaacctccttcttctcttctctcgtgattcgcgtcctcccaaccaatatcttcaccgaatctccttcatttataccaaaggcggcgaccatttatttcctatttctgacgccatttttctctgtgcaccactct

SEQ ID NO: 14105 - DNA, 274 bp, Glycine max
  Clone ID: 701068328H1
ggataaggaaggttgaagaagaagcatgacgaagaaggggaagaagcaattgatgtcatcggcgccgtggagaggcgaggagagtgaagaatccttcaaagagggaaagctgaaagtgacgaggcagggtgatggcacttccaccatgcacgtccctgcctccaagtccaagcatcatcaccatgacctccacgacgacctcggaatcgagattgatcctgaactacgctacagcttccagcgcaattttcagtttcttcagcgtgtttttagc

SEQ ID NO: 14106 - DNA, 279 bp, Glycine max
  unsure at all n locations
  Clone ID: 701068329H1
acgantcgcaaatttctcggcgtctctccaattgttcctgtatctcanaataacaacaagaatggcctccaacagagggtcaggtggaattcagcagctgttggctgctgaacaagaggcacaacggattgtgaatgctgcgaaaaatgaaaaattggctaggttgaagcaagccaaggaagaggctgaaaaggagattgctcaataccgagctcaactagaggctgagtttcaaaagacagtgtcagacagtactggcgattctggagctaatgtcac

SEQ ID NO: 14107 - DNA, 276 bp, Glycine max
  Clone ID: 701068330H1
ctcgttcttcttcttttgttgttctgtgtttgtgtttgttttttctctcacctgaaaatgtcttgctgcggtggtaactgtggttgcggaagctcctgcaagtgcggcaacggctgcggaggctgcaagatgtacccagacttgagctacactgagtcaaccaccaccgagaccttggtcatgggagtggcacctgttaaggctcaatttgagggtgctgaaatgggtgtgcccgctgagaacgatggctgcaaatgtggaccaaactgctcctgc

SEQ ID NO: 14108 - DNA, 277 bp, Glycine max
  Clone ID: 701068331H1
tcggctcgagcatctctgatctcactcaccattcaccaacctgcttctctgttctcttctttcccttcccaagaagaagaagaagaagatgccttcttcagaatcatcaacaggcttctccgaaaccatttgtgtgaccggcgctggtggcttcatcgcctcttggatggtcaaactcctcttggagaaaggctacactgtccgaggaaccctcagaaacccagatgatcccaagaacgggcacttaaaagagtttgaaggagcttcccagagacta

SEQ ID NO: 14109 - DNA, 80 bp, Glycine max
  Clone ID: 701068333H1
cagctatgatgctttcagtctagctggtttgtagtatgcatattcttaaagtgctaatgactttggatttcaattattct

SEQ ID NO: 14110 - DNA, 273 bp, Glycine max
  Clone ID: 701068334H1
tgacaatgcaatgctcgtgtcgttttggtgtcactgagtcagtctgagtacgaagaggaagccatgggcaacacatcctccatgctcacccaatacgacatcgaagaggttcagcaacattgcaaaaacgcttttacgcaacaggagatagtttctctgtaccaacgcttctgtcagctggatcgcaacaactgcggtttcatcccttccgatgaattcctctccattcccgaattcgccgtcaatcctctctctcagagtttgttgaggatg

SEQ ID NO: 14111 - DNA, 273 bp, Glycine max
  Clone ID: 701068335H1
cataaacccggcggtgacatttgggctgtttttggcgaggaagttgtcgttgcccagggcgattttctacattgtaatgcaatgcttgggtgctatttgtggcgctggcgtggtgaagggtttcgaggggaaaacaaaatacggtacgttgaatggtggtgccaactttgttgcccctggttacaccaagggtgatggtcttcgtgctgagattgttggcactttcgtccttgtttacaccgttttctccgccaccgatgccaaacgtaacgc

SEQ ID NO: 14112 - DNA, 276 bp, Glycine max
  Clone ID: 701068336H1
caaagataatgctaatatgttcaagtacttggcttgacatggtatgaataattgtgcaaatgaagtggttactgcaaaatcaaaacaaaaggatcatgcttgaacttctgaaaaaaaaagagaggagtttttcctaaaaaatccttgaaggaggagctgtcagtgcttgtatattttgcctccatgtagatgtgtgatcatgttgggaaattgtaatcaaaattccataatcctgctcactgatactttcaccatctttttgggttctgattgctg

SEQ ID NO: 14113 - DNA, 274 bp, Glycine max
  Clone ID: 701068338H1
gttgtacactgtgggacctttcttctgcacctcccaacctgctaaaccactccctaacggttattaattaatgaagccaccttctatatgacgtccgttgaaatggctgcaaagtggaaatcatcatttttttttatattcaatttctatttttgtgttttttttttttgcctgatgttttgttaagtgttggtttcatatgtaattcattggtagggggaattgattaagcctccttgccctttaagagatttatgttaagttttaatatgtc

SEQ ID NO: 14114 - DNA, 271 bp, Glycine max
  Clone ID: 701068339H1
ccacaagccatcttacttgacttgtctctgtctgtccatatataacattctattcgtacttcattttcattctcactccctcaaacagtcaaactttcatctttctcattcacttaaccccagtgtaaaaatggcagcattgaatatgtccactgtgagacttccaagagcttccttgtctggaacgacaccagctaggagatcttgtgctctcatcaagaatccatcatctttgaggtctgtgaagaacgtgtctaaagtatttggattg

SEQ ID NO: 14115 - DNA, 279 bp, Glycine max
  Clone ID: 701068340H1
ctcgtctccgagctcgtttcgttctcgaagaatcgatctgcgataatgactcgcggtaaccagagggatcgtgaccgcgaaagggctcaggctagaaccggtggtaaaggcaagcagaaagatgatgggttgacccctgaacagcgcagggaaagagatgcgaaggcgctgcaggagaaggcggcaaagaaagcggcacaggatgcaggagggaataatgcaggtggaaccaaaaaataggcaataattcaatgagtggtttgagttcgacattgttgt

SEQ ID NO: 14116 - DNA, 279 bp, Glycine max
  Clone ID: 701068341H1
ctctattctttgaaaccaaagttcaaactctgtcttccctgggttctatttcgaaatcaacgacgatgagttccacagaggcagcagccacagagaagaaaggtggaagagggaaaccgaagacttcaaagtccgtttcccgttcctccaaagctggccttcagtttcccgtcggccgtgtcgctcgctacctcaaggccggtcgctacgcccagcgcgttggctccggttcccctgtttatctctccgcggttctcgaatacctcgctgccgaggttt

SEQ ID NO: 14117 - DNA, 276 bp, Glycine max
  Clone ID: 701068342H1
gaaggaggagggccgcaagaccgacgaccacgtctccctcgtcaagcactacagatccaaggtcgagaacgagctcactcaggtctgcgccacatcctcaggctcctcgactccaacctcgtaccctccgcctccgccagcgagtccaaggtcttctacttgaagatgaagggcgattaccaccgctatctcgccgagtttaaggttggggacgaaagataaaccgctactgaggataccatgttgtcttacaaggctgcccaggatattgcttct

SEQ ID NO: 14118 - DNA, 276 bp, Glycine max
  Clone ID: 701068343H1
aaaacccccaactccaacctctgttcatcgtctaccgcgctttcttttcaaccagaactatgattaagctttttaaagtaaaggaaaagcagagagaacttgcagaaaatgcaagtggcggaccacctgttaagaagcaaagtgctggagagttgcgtcttcacaaagatataagtgagctgaatctaccaaaatcatgtaccatgcaattccccaatggcaaagatgatctgatgaactttgaagtttcaattcgacctgatgatggatattact

SEQ ID NO: 14119 - DNA, 275 bp, Glycine max
  Clone ID: 701068344H1
cgtcaatctcattgagcgagccaaagagagagagagagaaaccccacaaaacacaaaatcaaagggactcattaatttaagttaagcaacaacaacaaaaaaatggggatagtggaagaagctcacaacgtgaaggttttaggatccggcacgcggcacatagttctggctcacgggttcggcacggaccaatccgtgtggaaacacctcgtacctcatctcctcgacgagtttcgtgtcgtgctctacgacaacatgggagctggcaccaccaa

SEQ ID NO: 14120 - DNA, 275 bp, Glycine max
  Clone ID: 701068345H1
tgagaaataaggggaaaaaatggtgtcgctgaaactgcagaagcggatggccgcaagcgtgctcaagtgtggcagaggaaaggtgtggcttgaccccaatgaagtcaacgaaatctccatggccaattctcggcaaaacatcaggaagttggttaaggatgggtttatcatcaggaagccaaccaagattcactcacgctcgcgtgctcgtaggatgaaggaggcaaagaagaagggccggcactctggttatggtaagagacagggtacaaggg

SEQ ID NO: 14121 - DNA, 277 bp, Glycine max
  Clone ID: 701068348H1
tgactccttgatgaagctctttgagacaacaataaactcctcaattgcatggaaggaattcaaatatacgtgattggggattcatcaaaacttcctgagtctctaaggagtactatagctaatgcagaaaagagtacaaaacataactcgagactccaacttattgtggcaatgaattacggtgggaaatacgatgttgttcaagcatgtaaaagtgtagcaaaaaaagtcaaagatggtcttcttcatttggacaacatcaatgaaaaaattattg

SEQ ID NO: 14122 - DNA, 273 bp, Glycine max
  Clone ID: 701068350H1
gtcaaccaaaacagcacatgggagttatagaagctatgtgctgagttgcgaaccatcatcaatccaatcttgtgtgttactataagtatttaacagcatagacattagacacattcttcggttctggccaccctcaagtgtaaatacaaccttagcatgacattcaactttgtgggactacgtgttggagtttgattggtgaacgtggtgtgctaatgccttcttaagttttgcttttctgtcactttccctctgtgttggtttgctctcatc

SEQ ID NO: 14123 - DNA, 272 bp, Glycine max
  Clone ID: 701068351H1
aaattagttcattctctttgcgcagttccctacctctcctttcaagatgcagatcttcgtcaagaccctcaccggaaagaccatcacccttgaggtggaaagctctgacaccatcgacaacgtcaaggccaagatccaggacaaggaaggaattcccccggatcagcaacgtctcatcttcgccggaaagcagctcgaggacggccgtaccctcgccgactacaacatccagaaggagtcaacccttcaccttgtccttcgtctccgtggtg

SEQ ID NO: 14124 - DNA, 267 bp, Glycine max
  Clone ID: 701068352H1
gggttttgttccaaacaccctcccttcctacttctccttaacttccctaatcttcaaacttcccatctcatttcccttctctcaccccaaaactacttcttcaggaagaaagagcttagtttttcgtgtgcaaaacattgaccatacaattgaaccaattcctagtcatttgatgccttcagaaaatgaattctcagaactcaacagaaatctttacccgcaaatagaaccctacagtacaggattcttgaaggtttcagatcttca

SEQ ID NO: 14125 - DNA, 276 bp, Glycine max
  Clone ID: 701068353H1
ggaaatagaatacccagatagccaaattacagagaagcatagagctactttacttgaatttgggaagactcttgatgaaaaaaccacaactgccatggcccttactgttggtattccagctgctgttggagctttgcttttattgacaaacaaaattcagacaagaggagtcttaaggcctatcgaacctgaagtatacaatccagcactggatattatagaagcttatgggatcaagttgatagagaagaccgagtaatttgcatctatgaattg

SEQ ID NO: 14126 - DNA, 272 bp, Glycine max
  Clone ID: 701068355H1
atttaattatcgatgggttagaatttcattaatttatgattttggtcgtgctagattcccggaagtttcttttgaagaatttttgggtgtgtactagaaatattttaatttggcttcatggttttattgataaggatttgaatacgacttgggaatttaatatgcgatcagaatttttaattcaaaaaaaaaaaaaaaaaaaaaaaaggggggccccccgcttagtgcccccgtcccccggggatttattccgggccgggtccttcaggggg

SEQ ID NO: 14127 - DNA, 278 bp, Glycine max
  Clone ID: 701068356H1
atcacatctgagcaacgcaaattattgcaatggcctctgctcagtgtgagaaacccaacacaaaagttgaagttagccaaccaaaaagccaacacaaccccaatactgcaattgaagtctgccaacccaaaacccaacacagctcgttcggacaaaaattgtctgagataactagcaaggctttcaaagggcgacatggtagcaaccaaaatcaacttcaatgctatagccaaactcaggttgagtcacaaggccacaatggtaccaaaacagagact

SEQ ID NO: 14128 - DNA, 276 bp, Glycine max
  Clone ID: 701068357H1
gccgtggttgcccagtacaatgccagccagcttattactcagcgagaggctgttagtcgggaaatccggaagattttgactgaaagggctgctaacttcaatattgcccttgatgatgtgtcaattactagtctgacttttggcaaggagtttactgctgcaattgaagcaaagcaggtagctgcacaagaagctgagagggctaaatttgttgtagaaaaagctgagcaagacaagagaagtgctgtaatcagagcacagggagaagcaaaaagt

SEQ ID NO: 14129 - DNA, 277 bp, Glycine max
  Clone ID: 701068358H1
cacaaaaattgttaaattcccaatccaatagtgttattagtccataaaaggaaaaaataaaataaaaatgaatgtgttggattctaatgtggaggctctagccttcaactacttgagcttcggcttgctcacagccctcaacaacttgtggacctggctcgctctcttaaccgccgccttcagcttctggaagattcgctccacgggctgtctcaagcccgagcccaagcccgaggcccaagtccaggcccaaccttccatcaggcccgaccgggtt

SEQ ID NO: 14130 - DNA, 273 bp, Glycine max
  Clone ID: 701068359H1
ggaaggtacgctcagcgtgtcggtaccggtgctcccgtatacttggctgcagttctcgaatacctagctgccgaggtgcttgagttggctgggaatgccgcacgtgacaacaagaagaacaggattattccaagacacgtgcttttggcagtgaggaacgatgaggagttggggaaattgcttgctggagtgacaattgcacatggtggcgtgctatccaaacattaaccctgttttgttgcctaagaagaccgagagggcttccaaggaacc

SEQ ID NO: 14131 - DNA, 274 bp, Glycine max
  Clone ID: 701068360H1
aatccacagatcaacatttttctttggtgggtagcagtgaggataaaaaatggctatggccacagctgtcgtgtgtcctcagaacatcaccggagccatcgtgagctcacctagcaagaccaagaagagagtggtacacgtgagaggcataaattcatttgggggactgaaggctagcaatggtgttgtctctttggggattcctatgagcactgagaagtgctttgctaaggttgtgagctcagtgaaagcagctacatcaaatgggaaagga

SEQ ID NO: 14132 - DNA, 276 bp, Glycine max
  Clone ID: 701068361H1
agcaaacctaaagaaggctggcttccacacatgggagcagtcaattctcaaggatccacatcttatcactccaaatgcactttcatacaaatcagcaatgagagagaatctgttgaggcagggatacagaattgttggaatcattggagaccaatggagcgatctgcttggagaccacagaggcgaaagcaggacctttaagcttcctaatcccatgtactacattgagtagtaccttcacctctctcaacaatctagctagagtttgctcctatc

SEQ ID NO: 14133 - DNA, 272 bp, Glycine max
  Clone ID: 701068362H1
gagaatctgttgaggcagggatacagaattgttggaatcattggagaccaatggagcgatctgcttggagaccacagaggcgaaagcaggacctttaagcttcctaatcccatgtactacattgagtagtaccttcacctctctcaacaatctagctagagtttgctcctatctatatgtaataaggtatgctgatatgcactattcacataggagcattagctatgtttgttaatgtcactttatgttatgtgggtaagtcacctaagaca

SEQ ID NO: 14134 - DNA, 278 bp, Glycine max
  Clone ID: 701068364H1
gacagttacacaaagcaagaatcccaggcgaggagaaagatggaggggaaggagcaggatgtgtcgttgggagcgaacaagttccccgacagacagacgattgggacggcggcgcagagccaagacgacggcaaggactaccaggagccggcgccggcgccgctggttgacccgacggagtttacgtcatggtcgttttacagagcagggatagcagagtttgtggccacttttctgtttctctacatcaccgtcttaaccgttatgggagtcgccgg

SEQ ID NO: 14135 - DNA, 262 bp, Glycine max
  unsure at all n locations
  Clone ID: 701068365H1
gttccacacaagcancttccacatacaaattcaagtatcgaagaagaagatggctttaggtgttcctgcccttccgttaccatacgtggctcacgttctggcagttgttgccagcgtcttggtcgtggtctgggtcgtcaatttcaggggtggcttggcttgggattctgataacaagtccctcatcttcaacattcatccagttcttattgttattggcttactagttcatgggggtgaagctattataagttacaaagct

SEQ ID NO: 14136 - DNA, 193 bp, Glycine max
  Clone ID: 701068367H1
tggtacgaaaaatgtcgaagctgatcttcgtgttcctttcgctcattcctcttctctgcacctccttctccccagagagaccctcagatcgacgcgtcctcgtttcgctcgatgacttcgccatcaaatcctctcattctctcttcttcaactccctcaaatctcgcggcttcgatctccaattccacacaac

SEQ ID NO: 14137 - DNA, 273 bp, Glycine max
  Clone ID: 701068368H1
gccaattgtgataagccattcactcaggtgaaaagaaaaaaaaaacatatagtaacaaaaccatggtgattcacagactcgaattgtgcataaacatggttcaactcgccatagagttcgtcgtgagcgtcgcggaaacagtggtcatagttcagcagagaaccgtggagcctctcggaatgttgaatcgcgcaagtacacctcttcctttctatggctacctccgttgaatgttgaagagcatcgcttgattaattactttctagctttctt

SEQ ID NO: 14138 - DNA, 272 bp, Glycine max
  Clone ID: 701068369H1
tggaaacgaaggacgacagtgctgaaaacgaagaagcttggtcttctcatgaagacgaaattcttttgaactatgttcaagtccgtggagaaggaaattggagaaaccttcctaaaagagctggcttgaaacgatgtggtgagagttgcaaacaacgatggttgaactatcttaagccaaccatatctagaggaaacatttctttagatgaacatgaactcataatcagactgcataagctcttggggaatagatggtctatcattgctgga

SEQ ID NO: 14139 - DNA, 273 bp, Glycine max
  Clone ID: 701068370H1
caacgagtggggatacagctcacgtgtcattgatcttcttgtattcgttgccaagaagtctctttaaggtgttacttcaaagtagcttgtcttcacattattaccgtatgtttatgtttagctgcgatttagtgtcttgctcgagcaaaaaatgagaggtctgaataaatcggtttctgaaaccagtggtgttacttgttggaggagcattagctcttttttggacttttgatgttttctcttgtggagggggatcgagtttttggattttta

SEQ ID NO: 14140 - DNA, 113 bp, Glycine max
  Clone ID: 701068371H1
ggagcaggcaaagctcgagtatgctattgcttaagcatggagatgagatgccaaaattcttggttttttggctactcgaaattcctgtttaactgtacttccacacaacatac

SEQ ID NO: 14141 - DNA, 274 bp, Glycine max
  Clone ID: 701068372H1
caaacacgctgttcctacaatcattccaaatgtgcccttccggtcgcaccctcctcccttcctccgtctccgatttccgaccggcattcgacgtcctcgatgccgaccgcgacggcaaaatcagccgcgacgacctccgcgccttctacgccggagtcggcggcggaggagatgacgtgatcggggcaatgatgacagtggctgacaccaataaggacgggttcgtggagtacgaggagttcgagcgcgtggtctcggcggagagaaagcccgt

SEQ ID NO: 14142 - DNA, 270 bp, Glycine max
  Clone ID: 701068373H1
cgcgttctatatattattgaattgctcagtaggcctgatcttgcattgcgtcatcttctatgcgcattcttgttagctgccactacagaatcaagaaaagatacatgggaatattggaaaatgatcatgacagatcaggaaatgccagaaggacttcaaggtcttgtttcatttcaatctgagaataaccctaagactcaagagcagcttggtaaaggttccaaaaaccattgtgaagagtctctagttacaaatacacaagttaatagt

SEQ ID NO: 14143 - DNA, 274 bp, Glycine max
  Clone ID: 701068374H1
aagatgtcgaagcgtggtcgtggtggttcggcggggaacaagttccgcatgtcgctgggtcttccagtggcggcgacggtgaactgcgccgacaacacgggggcgaagaacctctacatcatttcggtgaaagggatcaaaggccgtttgaaccgtcttccctcggcctgcgttggcgacatggtgatggccaccgtgaagaagggaaaacccgatctgaggaagaaggtcttgccagctgtcatcgttcgccagcgcaagccatggcgccgaa

SEQ ID NO: 14144 - DNA, 273 bp, Glycine max
  Clone ID: 701068375H1
ctgcacttccaaatactgggagtgagaagctgccaggagtcctgaagatgtggtttaatgtcaaggtaaatcagtgtaacactagtttcacttttttgtatacctactagatcaacagattgaagcagaaaagtcttcgttactagtcctagagagcttttaaccaggaaggtggaccaagtccacagtggagttatttgtagggctgtgttcttcttgctgcaaatgcaacattgctgcttctcggctaattactggtgcattgttttggtt

SEQ ID NO: 14145 - DNA, 271 bp, Glycine max
  Clone ID: 701068376H1
ctcacgtacccaccaaattgtgtgaaaaaattgatctttcgtgcggcacagcgtgtgtgtgttgagaagatgaagggggtgttgtgggttgtagttgtatcaatggtggttgcagcatggatgcccttctcacactgttcaaagaaaccagtgggggtggctagaaaggaggacattcaatacatcaagtgtcaagtgtgtgagaaacttgctaaagaattgtatcagcaggttcaaaacaagcaagctgagatcgctcccaaaaagatct

SEQ ID NO: 14146 - DNA, 275 bp, Glycine max
  Clone ID: 701068377H1
gtataatctgaagattctattcctatttgttctgattcttttttatatttttctttcttctggtttcaggaccgagagcactgtgaatagagagtttctggggaggaattgttttcacaatcatggaaaggctgaactcagagttgtactaccagaactgtcacataatgaaagagaatgaaaggctgaggaagaaagctcagcttcttaatcaagagaatcaacaacttctgtctgaactcaaaaagaagctctccaagggaaatgcaaaaacc

SEQ ID NO: 14147 - DNA, 272 bp, Glycine max
  Clone ID: 701068378H1
gtcatttctgatgataattatggtggtgttattgtggaacttgatcagcatatggattctgcaacatttgtctcgatccttagagcttcagtttctcattggaagctgctgggcaagaagggtgtttggataaaattacctattcatttagtcaatctggttgaagctttagtgaaggagggtttttggtatcatcatgcagaaccaaaatatttaatgcttgtatattggattcctgaaagtccaagcactattcctgcaaatgccacaca

SEQ ID NO: 14148 - DNA, 274 bp, Glycine max
  Clone ID: 701068379H1
gttatttttctttttttctcatttgcactgcaaattgcaatggcttccaacaaggttattgccaccatcatggtgctttctctccttgcctactcaacatcattcaccaatgcatgtcgcacatgccacccaaaacctaccccttctcctcctcctccatcaggaaagtgccctaaggacacattgaagctaggggtgtgtgcagatattctaggtcttgttactgttgttgttggctcccctgtctccagcaagtgttgtgcattgcttgaag

SEQ ID NO: 14149 - DNA, 275 bp, Glycine max
  Clone ID: 701068380H1
agctgctccaaggagacatcgtgttgacgatgaactaagctcacaggctaaagctggtttgagaatgttgtttgcactcgatgaacaaagagtagctcaagcttttacttccccttttcctagttttgtgaaaataatgaaaaagttcaatgtcagtggatcatacactttgaaaatcccataccagttctcagctgcacatctcccaacttacaaaactgaagttacacttcgtaattcaagaggtgaatgctggactgtgaactcggttccag

SEQ ID NO: 14150 - DNA, 273 bp, Glycine max
  Clone ID: 701068381H1
ctttaatttcctgagttccggcgaattaacaagcttcaaattcaatcgcttttcatgcaaatggatgtttatacacacatctcattaccatctttcatatcgcatcgcttctcttcttcacgattccaatgctcatcactttcttcttattctcctttcaagcttgtctgttccaacagagactccaaggaatctcaacgaaacgacgataacaataacaagggtgataaatcttcaacagactgggacaaggcatggtcaaaattcaaaaag

SEQ ID NO: 14151 - DNA, 70 bp, Glycine max
  Clone ID: 701068382H1
cttgatgaacagtaccattctgatgtattgctttccttgaaagttactgcatgcttcttatcttctgtct

SEQ ID NO: 14152 - DNA, 271 bp, Glycine max
  Clone ID: 701068383H1
ctaacgcgtgcagagcagagagagacgcagccatggggcgaagacccccgaggtgttataggcaaattaagaacaaaccataccccaagtcacggttttgccgtggtgttcctgatcccaagatcaggatttacgatgttggtatgaagaagaagggtgttgatgagtttcctttctgtgtccatctggttagttgggagaaggaaaacgtttctagtgaggccctggaagctgctcgtattgcttgcaacaagtacatggccaaatttgc

SEQ ID NO: 14153 - DNA, 275 bp, Glycine max
  Clone ID: 701068385H1
tctgtctgataactctcttcttctcatcaacaaaaacaaaacttcaatttctctatgattatgataatgatgggttcaaacccaaaaccccttgtgcacctttctcttcttctcctggtcctcttttcttcctcaaccgaatccctgagatttgaaatccaatccgggcacaccaaatgcatctccgaggatatcaagagcaattccatgaccgttggcaagtaccaaatcgttagccccaacgagggtcaacctctgccagatgcccacagatt

SEQ ID NO: 14154 - DNA, 275 bp, Glycine max
  Clone ID: 701068386H1
gacttggtaagaaggcagaaggaagcagttcagaagaggaaagccataaagaaagggttgcaatctgacaaagactggacaggagatggttttgtgcaagaaactgaaagcatggtttcaaactgaaataaaatgtgcagttaaattatattagcgtgtttggaaatggaccatgggcatggtgtttcacatcttaattaatgttactagttctaccttttacatttccaaacacatttaagtaacctttcatatgcaattgcaaatgttgtcca

SEQ ID NO: 14155 - DNA, 275 bp, Glycine max
  Clone ID: 701068387H1
actgatcataaatcacatagctagttgtttaaagtgagagacaaagaaagaagaaaatggcaaactttccagttgttgacatggggaaacttaacaccgaagagagagcagcagccatggagattataaaagatgcctgtgagaactggggtttctttgagttggtgaaccatgggatatccattgagttgatggacactgtggagaggctcacaaaagagcactacaagaagactatggagcacaggttcaaagaaatggtggccagcaaaggg

SEQ ID NO: 14156 - DNA, 272 bp, Glycine max
  Clone ID: 701068389H1
cacggacagtcaattcatattggggaacccagcaatggattgacctagcgcgctttactggcctacaagttagaaagacagagccatcagcatcagatcctccgaatcctgctgcaattttatgcaacgaaacagaagaagccagcattgatgagagagaaaaataaatgtggtgaaaatacgttgcatcatttttttttcttggtaattttgtactattcttgaaaagctggtcaaataggcacaaaggaataggttctggtttttgtcat

SEQ ID NO: 14157 - DNA, 273 bp, Glycine max
  Clone ID: 701068391H1
caaaaaatgggttcttcttcttctatgtggacggtgtgtgtgattttggcatcactggcctctgcagcactctgtgccaacccacgcaggccagtggatgtacaatttggccgaaactacgtgcccacatgggcctttgatcacatcaaatatttcaatggtggttctgacattcagcttcatcttgacaagtacactggtactggcttccagtccaaacggtcttacttgtttggtcacttcagcatgtacataaagatggttcctggagat

SEQ ID NO: 14158 - DNA, 273 bp, Glycine max
  Clone ID: 701068392H1
catcccttccctccaaaccaagtttttctttctgtcttacacgtcaattttcctctcttcaaaacactttcacatgttctcatgatgaactcgcacaagcaattcttccccctcctctcacttttcttagttctctatctcttaggacaaagggtagtgctgcaagctgaagctcaccctcgacatcgtccaacaaaattgttcgttttcggagactcatatgctgacacaggaaacattcagaaaagtttctcaaattcatggaaggaccct

SEQ ID NO: 14159 - DNA, 262 bp, Glycine max
  Clone ID: 701068393H1
ctaacgcgtgcatagcagagtcagagacagagacgcagccatggccgcggagacctgcgaggtgttatacgcaaattaagaacaagccataccccaagtcacgtttctgccgtggtgttcctgatcccaagatcaggattcatgatgttggtatgaagaagaagggtgttgatgagtttccgctctgtgtccatctggttacttcggagaacgagaatgtttcaagtgaggccctggaagctgctcgcattgcttgctacaa

SEQ ID NO: 14160 - DNA, 272 bp, Glycine max
  Clone ID: 701068394H1
caaagagaatcctcactcattttcttcgtagccaaacactctgatattctcagttatgtcgtggcaaccgtatgtggatgatcacctactgtgtgaaatcgatggttaccatctcactcacgccgctatcatcggccaagacggaagcgtttgggctcagagcaccaacttccctcagttcaaacctgatgaaataactgccatcaataatgactttaatgagcctggctcacttgctccaactggattgtatatcggtggcaccaaataca

SEQ ID NO: 14161 - DNA, 255 bp, Glycine max
  Clone ID: 701068396H1
ctagaaacgttaatttctgtactgagaagaatggaaagcaaatagccagcactgagtgagtggatgtaattagatgaggagtcaacttggaaagaggcaagatcgttgtgcactctttcatatgattacagttactgggaggtaagaaatttcgaatgatgtggttgttgtaacaaatttctgttatctgaactcatttaggacttgttcggtggctaagatataattaggatagaatataaggagacacttgct

SEQ ID NO: 14162 - DNA, 280 bp, Glycine max
  Clone ID: 701068401H1
caattgtgttgtgggcatggattctctactggcgaactatgcctcttcagatgaagaagaagatcaacaacaaccatctccacccaaaacgacttcgttttcctctcttcctcagcccaaatcttctctctttcaatcccttcctcaacccaaatcctctcctttttcttctctatttcaatctcttcctccacccaaacaaccttccagcgaaagcgcttcactccctaaccctaaccctaaccctaaccctaaaccccaaatcgaagaaccacggccc

SEQ ID NO: 14163 - DNA, 274 bp, Glycine max
  Clone ID: 701068402H1
tggcacctgcaacacagagtctctctctcctcctcctgttctcactctgcatcgccgcaaccgttagatcgagcgacaggatctacgattgtgtgtacacggcctacgttagaaccggttcggtgttgaaggggggaacggactcgaagatcgggctgaagctgtacgacaagtacggctactacatctacattaaaaacatcgaagcatggggcggcttgatgggcaagggctacagctacttcgagcgcggcaacctcgacatcttcagcgg

SEQ ID NO: 14164 - DNA, 275 bp, Glycine max
  Clone ID: 701068403H1
aacatggctagggttagtgctttgtttcactctttgctcttgatttcttcccttgtattggcttctcaaatccatgtttcctctgggaaactagtccctggactatcatggaattactatttgttgacatgtcccaagcttgagaggattataaggaagcatcttgaggatgtcttcgagaaggacagtggagtagctcctggcatacttcgactcttcttccatgactgctttcctaatggatgccatgcgtctatattgttgaatggagacgg

SEQ ID NO: 14165 - DNA, 272 bp, Glycine max
  Clone ID: 701068404H1
agagtttgttgtgagctataagctagtttatcgtgaggagaatatgaagttgtttgttttctttgttgctgcagtagttttcgtagcatggccatgccatggcgcaggctaccaaaggttccctctccgaatgaaaactggctatggtgagcgttcttcggaggtaaaatgcgcaagttttaggcttgctgtggaagcacacaacatccgagcctttaaaaccattcctgaagagtgcgttgaaccaacaaaggactacattaatggcgaac

SEQ ID NO: 14166 - DNA, 273 bp, Glycine max
  Clone ID: 701068405H1
gttattttccatgaatgttggttgttgaattccttgtggcaaaaaaaatgttatgctgctatataggtttagtgacaccaaacagacgggaaatgggtcgtggggtcagtgctggtggtggacagagttccttggattatctctttggcagtggggtacctgccagcagtgcaaatggtgctcgcactcaaaatgcaagtgctccttcaccaccggttgataagcaaagtccagcaccagcaccagcaccagcacctgcacctgcagcagcag

SEQ ID NO: 14167 - DNA, 273 bp, Glycine max
  Clone ID: 701068406H1
gatctgctgaaacacgccacactcttcttaccatgggcctcctcgatcacttgtgggatgacaccgtcgccggtcctcgcccggagaacggccttggcaagctccgaaagcaccacaccttcgctttccgatctgcctccggcaagggtacgcatgcgcatgcccttgctgaacttaatttcccaaattcattttagttattctaaaaataatgataataataataacaagaaccgcagcaagaattagttcttatgatctcacgcgatcata

SEQ ID NO: 14168 - DNA, 275 bp, Glycine max
  Clone ID: 701068407H1
ctcttgcaggggttacttagatatgacccctctgaaagacttacagccaaggaagctcttagacattccttctttatgagagatcaatttagaagataattcactttctaagctgctgcatcatcgttgaccttcctaagggattaactttagaagatgtgggcaaatgaactcacctgggtgatggctggtttttcctgcagctgtcttcactcctgctgaaaaatcctcatttaggaatttttgaattgatccgaattcaaagtacagaagaa

SEQ ID NO: 14169 - DNA, 279 bp, Glycine max
  Clone ID: 701068408H1
cgaacgaaggctccttccgttattccattcagcgattccatggtggcgagacgcgtgccggcaatggcggcggtggccgttgccgcccttgacttgacggaatcctccaactggtggcgggacatcaaccgctccccgctctggcaggatcgcattttccacctcctcgccatcctctacggaatcgtcgacgccgactctctcgttcaattagtgcgaatacaattgagagtgccggaatatggttggaccacgcagaaggtctttcactttctcaat

SEQ ID NO: 14170 - DNA, 280 bp, Glycine max
  Clone ID: 701068409H1
gtcccgcgggagcagacgacctgtcttcatcgccaaacaacctcaaaaacattcatcaacgttcactattaatccatccatcattaagtaagaaaataaggttcgatttttttatctttgttttgcttctgatccatcatggaggtgccgagttcctgggatgcccttcgcaaacaggcaagaaaacttgaagctcagttggatgagcagatgaattcttatcgtaaattggtttctaataatgtttctacaaaacctgacgctgcagagagtgatctag

SEQ ID NO: 14171 - DNA, 279 bp, Glycine max
  Clone ID: 701068412H1
ctgtttctccctttctctctgtctctctctcgctcttcttctcatccagcaccgagtcacagactcaccgatcttccgattccctttcgtcttggtttatgagctcgaaggagagacccactcttggtggcacgcggattaagacccgcaaacggaatattgctgcgccgctggaccctgcagcattctcggatgcagtggtccagatttatttggataatgctggtgatctggaacttattgctaagagcattgaatcttcagaccttaacttttcaa

SEQ ID NO: 14172 - DNA, 278 bp, Glycine max
  Clone ID: 701068413H1
aagaaaatggcggtgcctctactctcgaagaagatcgtgaagaagagggtgaagaagttcaagaggcctcagagtgacaggaaaatttctgtcaagacaaactggcgcagaccaaagggtatcgattcccgtgttaggagaaagttcaagggatgcactttgatgccaaacattggttatggttcagacaagaagacccgccactatctccctaatggttttaagaaatttgttgttcacaatgtgaaggacttggaactgctcatgatgcacaacag

SEQ ID NO: 14173 - DNA, 281 bp, Glycine max
  Clone ID: 701068415H1
gaaacgaaaaagggttcggtgttctgttcgcgatgagagccaagtggaagaagaagcgtatgaggaggttgaagaggaagcgccgaaagatgagacagagatccaagtagtgcgttaaacctagtttgtttctgttgcttttacaattgcttatgttgtcgaatgggacacccagttgttagtggcactggtttctcctttttgatgtttgatacattttgttggattcaagtagtttatgttcgtcttatgttattagctcaaaacaatgttgttactgc

SEQ ID NO: 14174 - DNA, 285 bp, Glycine max
  Clone ID: 701068416H1
ggattcggctcgagcccaattctcttgcggtttattcattgtccgatggcttctgcagatgttgagtaccgttgctttgtcggtgggctcgcttgggccactgacgaccatgccctcgagagagccttctctcagtacggcgaaatcgttgaaacgaagattatcaacgatcgtgagactggcagatccaggggttttggttttgtgaccttcgcctcggagcagtccatgacagatgcgatcggagcgatgaatggacagaacttggacggccgtaatatcact

SEQ ID NO: 14175 - DNA, 272 bp, Glycine max
  Clone ID: 701068418H1
cttcaagcttgatcagtccatggctttgtctttctttcgctgttgctgtttctctgagtcctcagaatccaaagagtttatatgccatggtgatgtttgcatgctcagagataggaagaagtacaaagccaaaaaatccaagagcaacaagcattagaaaagatggtgttatgcaagttagaactatatgtcctatgtatgctgtttgattgtgtgcaagttacttttggttttatggtaaaatctttaaggttgtgtttggtatgaaagag

SEQ ID NO: 14176 - DNA, 271 bp, Glycine max
  Clone ID: 701068420H1
ctgagaggaagagagagggagattctttgtttgctaccttctctcggaaaaatggttacgttcagggtgcgtaagattcacaccatttggtgttcgatttcattttcctctgttaatgatttttacgaggtggtgttttgttatgtgtatttgcagtttcaccagtaccaggtcgttgggagggctcttcccacggaagcagatcagcaccccaagatctaccgaatgaagctctgggccaccaacgaggttcgcgccaagtccaagttct

SEQ ID NO: 14177 - DNA, 267 bp, Glycine max
  Clone ID: 701068421H1
ggcattggtgattgaagaaatggcgcatgcagcgaagggtacctacagagcctcaagatggtcccttaacggaatgactgctcttgtgaccggtggaactcgtggaattgggtcagtccctttatttattattagaaagggaatattttggttgtaaaaaagtgtgatgctttttggtctctagctatgaaaaactgtgtttgatttcaggcatgccatagtggaggacttatgtgggtttggtgccactgtccacacttgttccag

SEQ ID NO: 14178 - DNA, 273 bp, Glycine max
  Clone ID: 701068422H1
atggatttcatttatcattttcatctcaagcacaaatatcttggcagattggttttggaatgtgatgatgagtggaaagagtcatatgcggaggtgaagaaatacggatatcgctggctatatgaagaggatatagaagggccatcaaatccgttggctaggaagagcaaatttgggggaaatgaagaaaaagtgagcagaagggagaaaagatgatgcaagctgctcccaggaaaagccaataaagttgaatgttagggtgtagaatcatca

SEQ ID NO: 14179 - DNA, 270 bp, Glycine max
  Clone ID: 701068423H1
gagatattatggattgaagcgtggacaagttgtcaagattatccggccaagtgaaactgctggcagatatgttacataccgatttgttgtataagaatttgctttaacatatttggttatactgtcatagtgatggatagggatataaagccttctttttgcaaggggggaactcttgatttacaaggaaatgaaatgtgtgtttgtttctgtttattatagactattaagttcttttggtaaaaaaaaaaaaaaagggcggccgccgac

SEQ ID NO: 14180 - DNA, 280 bp, Glycine max
  Clone ID: 701068424H1
caactccgaaggcgagccacgatgtcaggaagaggaaagggaggcaagggtttgggaaagggaggagcgaagacgcaccgtaaggttctgagggacaacatccaggggatcaccaagcctgcgattcggcgcttggcgaggcgtggcggcgtcaagcgtatcagcggtctcatctacgaagagacacgtggcgttctcaagatcttcctcgaaaacgtcattcgcgacgctgttacttacaccgagcacgctcgccgcaagaccgtcactgccatggacg

SEQ ID NO: 14181 - DNA, 276 bp, Glycine max
  Clone ID: 701068425H1
atggggatccaacagtaaggatgcctcatataagcagaccggtgttcaattggaaaattacgctgtataatatcccaagaccaggatttcaaaagcccgagagtagtacaccatcaagaaaatcatacttggagcccatcgctcttactgaaaagggcttactttcagcagatttcgttctggacgatccagattctcactatatatatgtttgtaaaaagataaatgacacagagatagacaataatacctgcataccaattaacagctgatgtt

SEQ ID NO: 14182 - DNA, 278 bp, Glycine max
  Clone ID: 701068426H1
gaaactggaagatcgagagggtttggatttgtgaccttcgcctcggagcaggcgatgaaagacgcaatcgaaggaatgaacggtcagaacctcgacggtcgtagtatcacagtgaacgaagcacaatcccgtggaagacgcggtggtggacgtggatacggaggtggtggtggttatggcggcagcggttacagccgcggtggaggaggatatggaggaggaggccgccgtgaaggtggtggaggtggctataaccgcaacggtggaggtggtggata

SEQ ID NO: 14183 - DNA, 277 bp, Glycine max
  Clone ID: 701068427H1
gaggcgttctatatattattgaattgacaatgaggcctgctcttgcattgcttcctcttctatttgctttcttgtcagctgccactacggaatcaagaaaagatccacgggaatattggaaaatgatcatgaaagatcaggaaatgccagaaggacttcaaggtcttgtttcatttcaatctgaaaataaccctaagactcaagagcagcttggtaaaggttccaaaaaccattgtgaagagtctctagttacaaatacacaagttaacagtgactt

SEQ ID NO: 14184 - DNA, 229 bp, Glycine max
  Clone ID: 701068428H1
gttctgtgctattcgccctgaagggttgagggttttatactaggatttcctctcctccagggacacacattctcttagttaacaaaactgcatgcgtagtgccaacattttatacttcaaaattataccgaggaagatatgaaaaacataataaaattagcaacatgcaagcccctaaaaaaaaaaaaacacaaaaacaaaaaaaaacaacaaaaaacttacaaatgcc

SEQ ID NO: 14185 - DNA, 280 bp, Glycine max
  Clone ID: 701068429H1
attccaaatcccttttccgatttccaccaaaatctaaaccccaattcccaattacccttcccaattttcaccagaacctaatactcccacaccaatcttcgatactggacgccgattcacaacctcaacaactcgaagagagaacagaggagcaagaactgaagtacctggaattcgtgcaattcgcgaccatacaggctctgatgcgctgcgccatcctctactcatacgccaaggagcgcgcgggtcctctgaagcccggtgtcgacaccgtggagga

SEQ ID NO: 14186 - DNA, 280 bp, Glycine max
  Clone ID: 701068430H1
agaatttcggggatccttcagagaacaaggacttgcttacccaatttaggggtgctgctgtggccattgcttctgatgaaaagatagccttgctgggtgccatacagtctctctttgaaggttcaatgtacacctttgtgtttctatggactcctgcattgagcccaaatgatgaagagattccccatggttttatttttgcaacatttatgttggcttcaatgttgggaagctcgcttgcatcgaggttgatggcccgttcttcactccgagtagagag

SEQ ID NO: 14187 - DNA, 261 bp, Glycine max
  Clone ID: 701068431H1
gaaggcgtaatggagaacgtaggagacagtctgttcgtgggtgcattgtcagcccagacctctctgttttgaacttggtaattgtgaagaagggtgagaatgatttaccaggattgactgatgctgagaagccaaggatgagaggcccaaagagagcatccaaaatccgtatcctgttcaacctgtccaaggaggatgatgttaggaagtatgtcaacacctaccgtcgtacatttacgacaaaagctgggaaaaaggtga

SEQ ID NO: 14188 - DNA, 238 bp, Glycine max
  Clone ID: 701068433H1
gttgcgagactgaagaaatggcgcaagacttggcattggatttggaggagcttcgccgcctccacagcatcgccaaaagacctcgaaccctctctcttctctcctccgaaattcgtaacctcgaaaagttatcgtcagaggaagcttctgcgcagattccggagccgatttcgaccgggactaaagtggcgccttcacctgcgctgaagtatgcgggactcgcgtcgttcagttggga

SEQ ID NO: 14189 - DNA, 272 bp, Glycine max
  Clone ID: 701068434H1
caaagatgaagatgatccacgttcttctcctctttgctcttgtctcgttcacttcccatgcttctgtcaatgatttctgtgtagcagacctaaaaggtccagatagcccttcaggctatcagtgcaagccacctaacacagtcacagtggatgactttgtgttctctggctttgtagctggaaacaccacaaacactttcaatgctgcattaacctccgcatttgttactgattttccaggtgtgaatggtcttggtgtatctgtggcacgg

SEQ ID NO: 14190 - DNA, 269 bp, Glycine max
  Clone ID: 701068436H1
caaattcgatttgtaccaaattttcttcacaaaatgtctggtcgtgggaaaggtggcaagggtttgggaaagggaactgccaagaggcacagaaaagttcttcgtgataacattcaaggtatcacgaaacctgcgattcgtaggttagcgagaagaggtggcgttaagaggatcagtggtttgatctatgaggaaaccagaggagttctgaagattttcttggagaacgtgattcgagatgctgtgacctacaccgagcacgctaggag

SEQ ID NO: 14191 - DNA, 269 bp, Glycine max
  Clone ID: 701068437H1
gcttgctactgagtttccacactgcataccttacgtcttccgaattcgaagttaatttgcaagatggctaaggaaaaggctcagatcaacattgtggtggttggtcatgtggaccctgaggaggcaaccaccattaacgagctgaagaagcctgttgtggagaaagaagctccagggcatgccatatgagggcatgcacgtacggcctcggaggggaaccagaaaattatgttaacaaaataatctggaaccctaatgtatcagtgtca

SEQ ID NO: 14192 - DNA, 269 bp, Glycine max
  Clone ID: 701068438H1
cacgaaccctaacacctaaaagccagaagaagcgaaatcgtaatcgcaatctagcggatatgaaggtcgtcgctgcatacttgctcgcagtgttgggagggaatccatctccttctgccgatgatatcaaaaacatcctcggcgcagttggagctgaggctgagcatgagttgattgacttgctcttgaccgaagtcaagggcaaagacttcaatgagctacttgctagtggaagcgaaaagatttctgcagtggctggtggtggtgca

SEQ ID NO: 14193 - DNA, 271 bp, Glycine max
  Clone ID: 701068439H1
gagtgatttcagtgagtgatcggtgttcacttgatctcatcataatcgtcagcgtcaattgaagaagatgccgatcagaaacatcgccgtcggaaggcctgaagaggcgactcaccccgacacgttgaaggcggctttggctgagttcatctcaaccttcatcttcgtgttcgccggctcaggctccggcatcgcctacaacaagctcaccgacaacggcgctgccacccctgccggcctcatctccgcctccatcgcccatgcattcgcc

SEQ ID NO: 14194 - DNA, 276 bp, Glycine max
  Clone ID: 701068441H1
gttgtaccaaatcaaagaccatgtctgggatgcttccgggagttgaatgtgctcgaaggagacgcttgcataacagtgctggtgatgattccaccagcaaccgctctttctgtttgtatactaccaggaacctccaatcctcttcctctttactggtacctttaccttcctctttcgtccactttaatttctctctctgtctataatggggatgcgttattattttaatgaaaccaggaaagaagcatgttaaatcgggcatacccagatgaaaat

SEQ ID NO: 14195 - DNA, 158 bp, Glycine max
  Clone ID: 701068442H1
caagctggtaacatgtaatgcaattatattttcatattctgtggtttaaaatcgtgattatatataaacgtttttaaaaattacacattaggatatgctcttttttctgaaatgaaggttgatatttctatccaaaaaaaaaaaaaaaagggggggcc

SEQ ID NO: 14196 - DNA, 268 bp, Glycine max
  Clone ID: 701068443H1
gcgaatagaaatgaagatgacttttccttcaagatggttagaacaaaaaccgttgatggagttcataaagcagagagtgaagcgaataagtatactcaggaagagcttatgctgatgaagactcaggacatgggttacattcttcagaagattcagagtgagagaaatgacattcgcaggctaactgcctcactgcactctatcgataatcagccggcggacaagcatgttttctttgctgaggacatggaagacgctgaagcagtag

SEQ ID NO: 14197 - DNA, 273 bp, Glycine max
  Clone ID: 701068445H1
tgaaaacttagtaatttgaagcatagtatgaaactcataccaaaccataacaaaaataaaacaaacaaacaaaactctccacttgacataatctaggaatattgggcctcaaacaatttaggggtggtgctcttttcttcatgcataggaagattactagctagaagaaattaagagtgtagaatgttatgtgtataatactgtagagcaagtttatgttaagagtttttaattgcacggatcaacacaaaaccaatcccttctgaatatcag

SEQ ID NO: 14198 - DNA, 268 bp, Glycine max
  unsure at all n locations
  Clone ID: 701068446H1
ctataagctagtttatcgtgaggagaatatgaagttgcttgtcttctttgttgctgcagtactcttggtcccatggccatgccatggcgcacgcacccagaggctccctctccgtatgccaactggctatggtgagcgttcttcggacgtacaatgcgcaagttttaggcttgctgtggaagcacacaacatccgagcctttncaatcattcctgaacactgccttgatccaacctaggactacattaatggcgggcgatttcgctca

SEQ ID NO: 14199 - DNA, 280 bp, Glycine max
  Clone ID: 701068448H1
cgatactcgctggtcaccaggttggcgattttggcctatcaaagattaagcgaaataccttggtgtctggtggtgttcgtggaactctaccttggatggcaccagagctgctaaatggtagtagcaataaggtctcagaaaaggttgatgtgttctcttttggcattgtcttatgggagattcttactggtgatgagccatatgctaatatgcactatggcgcaatcataggaggcattgtgaataacacattaagacctacaatccctagttattgtga

SEQ ID NO: 14200 - DNA, 88 bp, Glycine max
  Clone ID: 701068449H1
agcaccgaattgctcatcaagacttgcctctttaccatttcattcctaaaaccctattcttgttcgctcattcatcagcactgtcatc

SEQ ID NO: 14201 - DNA, 267 bp, Glycine max
  Clone ID: 701068450H1
taaaatttgaatcaggagtgtggaatgttttgccccctaattcctctgacaaaatgggggttgtggaccctgtctggacagagagcaactggaatacaataggtatgcgggtctacacagtacaaaatgctgcttatgatcgtcttgttctgtttgggggcatcactctgaccgtctttgcataccttgcaatagcaaccgcaagagcttttttcaacaaagcaatgaagagggattgacattttacttccagaatctgactagtaa

SEQ ID NO: 14202 - DNA, 250 bp, Glycine max
  Clone ID: 701068451H1
tttacacatttctatgaagcaatcggttcgtccataccattggtagagcttgtaaaaccacgactgatccataaaggaatgaatggaaaaagtagcatgtcgtatcgatgaagaattctaaaaatatttcattctcttataggatccggccagaatttttgtttgtgaattcttggctcggaacaaaaaaattcagttgggtttaattaataaagggatagagcttggtgattccaattataataataag

SEQ ID NO: 14203 - DNA, 271 bp, Glycine max
  Clone ID: 701068453H1
ggcgtactatatattattgaattgacaatgaggcctgctcttgctttgcttcctcttctatttgctttcttgttagctgccactacagaatcaagaaaagatacaggggaatattggaaaatgatcatgaaagatcaggaaatgccagaaggacttcaaggtcttgtttcatttcaatctgaaaataaccctaagactcaagagcagcttggtaaaggttccaaaaaccattgtgaagagtctctagttacaaatacacaagttaatagtg

SEQ ID NO: 14204 - DNA, 270 bp, Glycine max
  Clone ID: 701068454H1
attctttgttgcaatatcacaaacacctcgtccgtcacaatgcagctagctgtggcggccaacgctgtcgtttcaccgtcgccgttccgacctcatccccttctccggtcatccttctccggcgtctccgttaagctcactccccaatccataacgttttcacgcttgaagcccctcaccgtcttcgccgccaccaagaaggccgtcgctgtcctcaaggggacctccgccgtcgaaggcgtcgccactctcatccaagaagacgatggc

SEQ ID NO: 14205 - DNA, 272 bp, Glycine max
  Clone ID: 701068455H1
aaaaaatataaaaatgtgaaattaaaagttacaacaattataattgtccaaaacacacgccttggattattttagcataaaagtttggtaccaaatacacactgtagtagactgagaagtaaaatcgaacagcattacctcagagcactgccctgaaagtagaacacctattaattactgacaaactaaaacagaaacactagcaatcgggaaagtgcatgttagacagcaagagtgaaacgcattggtttaattttgggagcttcacttcc

SEQ ID NO: 14206 - DNA, 276 bp, Glycine max
  Clone ID: 701068456H1
aaaatggcacctgcaacactgtctctgtctctcctcctcctgttctcactcagcatcgccgtaaccgttagatcgagcgactacgactacgattgtgtgtacactgcatacgttagaaccggttcggtgttgaagggcggaacggactctaagatcgggctgaagctgtacgacaagtacggctactacatctacattaaaaacctcgaagcatggggcggcttgatgggcaagggctacgactacttcgagcgcggcaacctcgacatcttcagc

SEQ ID NO: 14207 - DNA, 268 bp, Glycine max
  Clone ID: 701068457H1
gtaaattggaaaggtgtagcatactacaataggttgatcaattacttgctagagaaaggtattactccatatgcaaatctctaccattatgatcttcctttagcacttgaggagaggtacaacggattattgagtcgccaagttgtgaaagattttgcagattatgcagaattttgtatcccgacttttggagatagagttaagaattggatgacgtttaacgaacctcgtgtggtggctgctcttggctatgataatggtttctttg

SEQ ID NO: 14208 - DNA, 272 bp, Glycine max
  Clone ID: 701068458H1
tcgttcccaaacccagtggaaagtagcgaaatgtatcgaacggcggcgaacggttggtgagcggtgcaagatactactatactggcaacgttgggctcagattccggccttctcagatattgataccctcttctcgcttttccacatccgagactcaaccacttcccattcccgtcgccaccgaaaccgaaacccctaactcttcagattcgtccccttcttcttcatcttcctcaacagccacaaaacccagagccaagtacgaggaccaa

SEQ ID NO: 14209 - DNA, 274 bp, Glycine max
  Clone ID: 701068459H1
ccgcgagcgtagtcgcaagacacgcaacagaatagaacgacgaataggcgtgcagggaaaccatttcattttcgagcgcgtcgctttcgaatccaatggccttcaacaacgcactgagatctgccgcgaagctcgtcgcttcttccgaatcttccttctctaactcagtgagcagaggttttcattcaactggcatgaagaggatgggaggtggacatggtcatgatgagccctactatcttcatgcaaagcacatgtacaacttggacaagat

SEQ ID NO: 14210 - DNA, 273 bp, Glycine max
  Clone ID: 701068461H1
cacgagacaatggaatggggatttccagatgcctggatcaaattcagtggaattttagtctatctgacttaacagcagatttgtcaaacttgggagatctaggagctctaggaaactatcctggttcaccatttatgcagtctgattcagatattttgcttgaatcatcggatcaaaaggacatagtggatgacttctttgctaatacagagcccccaggttctccgtcagacgaggagaaaccttaagtgcagctgtagcaagttatgtttc

SEQ ID NO: 14211 - DNA, 276 bp, Glycine max
  Clone ID: 701068462H1
cttgaatgtgtcaactatgacatgaaagttgggttattttggattataatgcgtagaaaatattcattatgctcagaaaacctgccccttttaaatgttattcgtagaccttaatgtatttggacaaattgattatcgattgtgttgtaaaaaaaaaaaaaaaaaaaaaaaaaaaaaaaaaaaaaaaaaacaatataataggaaaatggaaccttggcttgagataagtattcccaagttccgaagttactggacgaagtatgttgactacgatca

SEQ ID NO: 14212 - DNA, 289 bp, Glycine max
  Clone ID: 701068464H1
tcacggttctagcgcttttcctacggaatatttctcacggaattaattccgtcagaaatatttgaattttgaacataattttttccacggaattcattccgtcgaaagtataacttacccacagatggttacccacggagatctattcgtcgaaaatttgatacctttctggcagattatttgaatggaatatgcatccgtcggaatttaaaaattttcccaaacataaagaccccaaccctaattgcctctcactcacttacccacaaatcatttcttcctcccacgg

SEQ ID NO: 14213 - DNA, 266 bp, Glycine max
  Clone ID: 701068465H1
ctcggaactgaactgaactgaactgaaccggatccagagagtgctcctaaacgacgccgtttcgcaagcatcagtagtgtagtcgcagagaatcaaatcaatggagaagggaaagggagtgatgggatcgggaggacgaagatggggcgttgacttctccgacaattccacttctcgcgatattcccgatcctcccggtttctgtcgcacttctctcgatcaggacgattcaacgctcagtcgccagaagaaggacgctgaatcca

SEQ ID NO: 14214 - DNA, 269 bp, Glycine max
  Clone ID: 701068466H1
aagaatttcaagacttatcttgggaggccttggaaggagtactctaggactgtgatcatgcaaagtagtataagtgatgtcattgacccaattgggtggcatgagtggagtgggaattttgcattgagtactttggtttatagggagtaccaaaacactgggcctggtgctggtacttctaatagggtcacttggaaagggtataaggtcatcactgatgctgccgaggccagggattatactcctggaagcttcattgggggctctag

SEQ ID NO: 14215 - DNA, 268 bp, Glycine max
  Clone ID: 701068467H1
caagctcttgaagatgaatatgggggatttctcaaacctgaaatagtggaggacttccgtaactatgctgacttttgcttcacgacatttggtgatcgggtgaagcactgggtaaccctaaatgaaccatatggctacagcgtgaatggctacagtggtggaaattttgcaccaggtagatgttctaactacgttggaacctgccctgctggtgattcttccaccgagccctacattgttaaccaccacttaatacttgctcatggag

SEQ ID NO: 14216 - DNA, 269 bp, Glycine max
  Clone ID: 701068469H1
aaacaaacccactaagatggcttcctttgtatccttcctagtgctgcttcttgcagcccttatcctcatgcctcaagggcttgctacttactacaaaccaattaagaagccaccagtgtacaagcctccagtgtacaagccaccagtgtacaaaccaccggtttataagccaaaaccaccggtttacaagccgaaaccaccggtttacaagccaccatataagaagccaccatacaagaaaccaccttatggaaagtaccctccagtag

SEQ ID NO: 14217 - DNA, 267 bp, Glycine max
  Clone ID: 701068471H1
gagagtttgttaaagaactgtgaagaagagggtaactgcaaacaaagcaagcaaaacaaaagacgcagtgatggagaggatgaagagggtgcttctgccgcttctggccttcactgttcttctcatgttgccagaagcttctgctacaaagtttactgttggaaacaaccagttttggaaccccaatattaactacactgagtgggctaaaggcaaacatttctaccttggtgactggctctattttgtgtacgataggaaccaagc

SEQ ID NO: 14218 - DNA, 269 bp, Glycine max
  Clone ID: 701068472H1
cgattacgttctctaaaattcactcccaaaaaactctatttgattccaccgaaatcctaaccatcttcgacgaacgaagggcaatcagttgctcgctccttcgatccattcttggaattctcgttatcgctcttcgaagtcaagctctctcgctcgccatttctgcatctgcaccaatttctgcggtttctctagatttagaggatcaaagtggttcattcctttgaagcatgccggggttaacgtgcaagcttgcaacaccaaattca

SEQ ID NO: 14219 - DNA, 158 bp, Glycine max
  Clone ID: 701068473H1
ctgtattttactgtgtattcttaattttctgcctctgatgatgattgaatgagcctaatttgatgtaagatcatttaattgtgattttcttagttttttttatgagctaaaaaaaaaaaaaaaaaaaaaaaaaaaaaaaaaaaaaaaaaaggggggcc

SEQ ID NO: 14220 - DNA, 274 bp, Glycine max
  Clone ID: 701068474H1
ctgtgtatttccctacctctcccttcaagatgcagatcttcgtcaagaccctcaccggcaagaccatcacccttgaggtggaaagctctgacaccatcgacaacgtcaaggccaagatccaggacaaggaaggaatccccccggaccagcaacgtctcattttcgccggaaagcaacttgaggacggccgtacccttgctgactacaacattcagaaggagagtactcttcacctcgtcctccgtctccgtggtggcatgcagatcttcgttaa

SEQ ID NO: 14221 - DNA, 275 bp, Glycine max
  Clone ID: 701068475H1
cctagttcgcttgcagtcacacaagaggccaatcctattcatagctcgagatgggtgaagaagtgaaggtagttgttccagaatcagtgttgaagaagcgcaagagggaggaggaatgggcgttggccaagaagcaagaactcgatgctgccaagaagaagagagccgagagccgcaaactcatctacaacagagctaagcagtacgctaaggagtacgatcaccaggagaaggaattgattcggttgaaacgcgaggccaagctgaaaggtggt

SEQ ID NO: 14222 - DNA, 272 bp, Glycine max
  Clone ID: 701068476H1
gacaaactccttttaagagagaaggatcgaaaatgggagctggaagtttcctcaaggtggttctaaaaaattttgatgttctcgctgggcctttgcttagtcttgcctatcctctatatgcctcggttagggcaattgagagcaagtctcctgttgatgaccagcaatggctcacttattgggttctctactccttgatcaccctctttgaacttacttttgccaaagttattgaatggattcccatctggccatatgcaaagctgatcctt

SEQ ID NO: 14223 - DNA, 272 bp, Glycine max
  Clone ID: 701068477H1
ccaaacattagttcaccactaaaccaacaagcagcacagctttggagcaatcaagaagaatacaggaagatggtggagaggttgtacaaatctgcaaattgatatcagtcttgcaggagagaagaagggtccattcctgtctgcttcggagaagagaaagggatgaagccattatttgtttttagggtgcccttttctgatgggcctgcttttatatattacaatttacgaattgttgcatgtttctctcttctttacaattgatagttaaa

SEQ ID NO: 14224 - DNA, 277 bp, Glycine max
  Clone ID: 701068478H1
tcctgcgcgtgaacaagcctcaggtaagccaaagccatggttaagcataacaatgttatccccaacggacacttccgtaagcactggcagaactatgtgaagacctggttcaatcagccagcacggaagacaagaagacggttggctcgtcagaagaaagctgtgaagattttccccagacctacagctggacctcttagacccattgtacatggtcaaactttgaaatacaacatgaaagtgagagctggaaggggattttcccttgaagaactca

SEQ ID NO: 14225 - DNA, 277 bp, Glycine max
  Clone ID: 701068479H1
gaacaaaagagctggcttgggcttggcgtggttccatccatggcagactacgaaaccagcaccagccacaaccaccactcgaaagaaacagccttccaggccctgaacaccataatccagctccacttcgagaaaaccctggagaagaagcgcgccatcgacctccagaagaaggagcttcacaagctcatccagatattcttcatcttcttgggcctcgtcttcctggcccaggcccagtcccctcgcctccaatgccgccactgctggatcccca

SEQ ID NO: 14226 - DNA, 279 bp, Glycine max
  Clone ID: 701068480H1
ggattgtggctaaggctggggacactgttgaggtgcgtgatgggaaactactggtaaatggtgctgctgaagaacggcaatttgtagtagagcctctagcttatgagatggatccaatggttgtgccagaaggatatgtgtttgtaatgggagacaatcggaacaacagctttgattctcataactggtgatgaaggtttccagatacgttcatctattctaaattgacagtttctcccgtctttgcctgggaatgagctgttcggagattctcttaga

SEQ ID NO: 14227 - DNA, 271 bp, Glycine max
  Clone ID: 701068481H1
aacctacctctttttcttctctctcaacaacttcaccttcttcctcctcgatcatgtctcacttcaagggcaagtaccatgatgagcttatcgccaatgctgcgtacattggcactcctggaaagcgtattcttgctgctgatgagtcaacagggacaattggcaagcgtttggccagcatcagtgtagagaacattgaatccaacaggcgagctcttagggagctgcttttcactgctcctggtgttcttcaatatctcagtggtgtcat

SEQ ID NO: 14228 - DNA, 269 bp, Glycine max
  Clone ID: 701068482H1
ctagctttgaaagaaataatccaattgaatttgagcttggtactggtcaagtgatcaaaggttgggaccagggattattgggaatgtgtcttggtgagaagcggaagctgaaaataccagcgaaacttggctatggagatcagggttccccacccactattccaggtggtgcaacactcatatttgacactgagcttgtgggagtgaacgacaaaagtttaggcgaagaaaaagaaaactccgaactgtagacaaatcaaaagaaatgg

SEQ ID NO: 14229 - DNA, 267 bp, Glycine max
  Clone ID: 701068483H1
gcctgtaagagtgaaaaaaccttctcttttccttctctcaagtctcaagagatttcatcatggctccaaagaaggacaaggctccaccaccttcctccaagcccgccaaatctggcggtggcaagcagaagaagaagaagtggagcaagggaaagcaaaaggagaaggtgcataacatggtgctgtttgatcagggcacctatgataagctcctttctgaagctcccaaattcaagctcatcactccttccattctttctgatcgtt

SEQ ID NO: 14230 - DNA, 268 bp, Glycine max
  Clone ID: 701068484H1
gggaggtgaaaccagcacaaatagcatagcatccatctttgcctggacaagagggctagcccacagggcaaaactggacgacaatgccaaactcttggatttcactgaaaaactagaggcagcttgcattggagtagtagaggctgggaagatgaccaaggatttggcacttattcttcatggatccaagctttcaagggagcattatttgaacacagaggaattcattgatgccgtggcagccgagcttagtgctaagctttctaca

SEQ ID NO: 14231 - DNA, 270 bp, Glycine max
  Clone ID: 701068486H1
gggttttccaattcacagagcaacacaacgaaccaacaatggcgcagctcagccgcagtcgcagccgcagcacgggcaagcagcgctggagcaggtgcagtgcttcggtcgcaagaagaccgccgtggccgtgacctactgcaagcgcgggcgcggtctcatcaagatcaacggctgccccattgagctcgtggagccggagatcctccgcttcaaggccttcgagcctatcctcctgttgggtaagagccgcttcgccggcgtcgacat

SEQ ID NO: 14232 - DNA, 259 bp, Glycine max
  Clone ID: 701068487H1
gacatcaaaactcctggttttggtgaaaaccgtaaatctggatctccaggatcttgctgtacttacaggaggtcaacttatcactgaagagcttggcttgaatcttgaaaaagtagatctcgaggtgtttggctcttgcaagaagataacaatttctaaggatgacactgtcatccttgatggagctggtgataagaaagcaattgaagaaacaagtgagcagattagatcagcaattgaaaatagcacttcagattat

SEQ ID NO: 14233 - DNA, 274 bp, Glycine max
  Clone ID: 701068488H1
agcatccactgtcgccgtcgcacactcgcacgccgctcacaggtttatgggctacgctgatgtcctgaatttgttgttggccgtggtggtttggtgcactgcttacgttactgttgtagttctcgcttcctttcgagccgtttgcactctctgaaaccttgcaatttcattgataacatgggttatgcacagcttgtcataggtcctgctggtagtggcaagtccacgtattgctcaagtttgtatgaacactgtgttgctgcacggcgatcga

SEQ ID NO: 14234 - DNA, 174 bp, Glycine max
  Clone ID: 701068489H1
ccattatggattactctgatgatctctctacacctttgctttctcgaagtctcagcttgccttgtcggaattccctcctgttccggtcatcacacttctttctctggtcactccctcagattcaccctctctagctagttcccaacaacaaactccacggttccacacaacata

SEQ ID NO: 14235 - DNA, 123 bp, Glycine max
  Clone ID: 701068490H1
gaaataatttgtagtttgtattcttggatctaaagcttgtatttaatcatcaatttcaatatattaaccctaaaatgtgaaattagtcattgggttatatcagaaaagaaccaacacagaaaa

SEQ ID NO: 14236 - DNA, 274 bp, Glycine max
  Clone ID: 701068491H1
tatctcatttgaatacattccttgtagtttatactgaaagatgggtttgaagatggcgttactgatcctaggcctttccctcatgctccttttggtctcctctgaggtggcatccacgaatacaaaagaggaggcaaatggagtggatgatgccaaatatcccggtggaagctatggagggggttacccaggtcatggcggtggcggttatcctggccatggcggtggcggttatcctggccatggcggtggtggtggctatcctggtcatggt

SEQ ID NO: 14237 - DNA, 275 bp, Glycine max
  Clone ID: 701068492H1
cttgctaccaacactgagcttaaccgagcttcgcaaagatgaatcgggaaaagttaatgaagatggccggttcggttagaactggaggaaagggtactgtgagaagaaagaagaaggctgtccacaagacaacaaccacagatgacaaaaggcttcagagcaccctgaagagaataggggtgaatgccatccctgctattgaagaggtcaatatctttaaggatgacgtagttatccagtttctaaatcccaaagttcaagcatccattgctgct

SEQ ID NO: 14238 - DNA, 275 bp, Glycine max
  Clone ID: 701068493H1
ctttcagctcctaagagcacgcatcactgttgcacttcttactcgttctccctctttttctcttcttcttcttcttcgctaaacccccctttatttttcctatctcactaacatcgatgggagacgagaataagaccaagtcccctgcttccggcgtgtggtccaccatcaagcctttcgtcaatggcggagctccggcatgctcgccacctgcgtcattcaacccatcgatatgatcaaggtgaggattcaacttgggcaaggatcagctgcgc

SEQ ID NO: 14239 - DNA, 276 bp, Glycine max
  Clone ID: 701068494H1
atcacaggggtgtaccacaactggcagaatctgaatcatgatagacaactatggaagttaggaacactgccaccgggtctcataacattctggaaacgcactttccctctgaaccgatcttggcacatcttaggtcttggctacaaccccaatgtcaaccaaagagatatcgagcagtctgctgttgtacactataatgggaacatgaaaccttggcttgagataagtattcccaagttccgaagttactggacgaagtatgttgactacgatcat

SEQ ID NO: 14240 - DNA, 183 bp, Glycine max
  Clone ID: 701068495H1
gtaaaattcaggaaaaaaaaaaaaaaaacatggtgctgaaggtgaatggtcaaacctatggatcccccaagagggacctggagtgtctgattgagaaggaaattgagtttgaaacagtgcatgttgatctcttcaagggagcgaataaggaacctgagtcccttaagctgcagccatttggat

SEQ ID NO: 14241 - DNA, 278 bp, Glycine max
  Clone ID: 701068501H1
cggctcgagttcacagatttttgagaaattgatttctggcatgtatttgggggaaattgtaaggagagctttatttaagatggccgaagaagctgatttttttggagatactgttccccccaaattgaaagttcctttcatacttaggacgcctgacatgtcagccatgcaccatgacacaagttctgatctgaaagtagttggaaacaaattaaaggatatattagagatctctaacacatccctaaaaatgaggaagattgttgttgaactgtgtg

SEQ ID NO: 14242 - DNA, 283 bp, Glycine max
  Clone ID: 701068502H1
ctcattctgctcaaaccaacctctcatcatggttagggaacggctgctatcttagctcggaaatcactccttgctcttcgtgcgcgccaattggctgtaagcggtcaagggctgcacagctcccaaaactatggccttcgattaagtgcacactcctactctaccaaaagagaggatgaagaaagggagcaactcgcaaaggaaatttcaaaggattggagttctgtttttgaacgtagcatcaacactctctttctcactgaaatggttcgaggtctaatgc

SEQ ID NO: 14243 - DNA, 271 bp, Glycine max
  Clone ID: 701068503H1
cgcacttggaagcacccgagaggccactcagccagactgcattcaggccctcatcgttgaattcatagccaccttcctctttgtctttgttggcgttgcttcttccatggtcgttgacaagcttggtggggatgcactagtgggattgtttgctgtggccgtggcacatgcacttgtggtggctgtaatgatctccgccgcccacatttctggtggccacctcaaccccgccgtcacccttggcctccttgccggtggtcacatcaccatc

SEQ ID NO: 14244 - DNA, 274 bp, Glycine max
  Clone ID: 701068504H1
cttgagaattgacaatctctcttattaatcaccaccaccacttccggcgaacattacctccgaattccggcgacgccacgcttctgacaccgttgtgtttcagcgagggcaaggtgcttgaacatctgatttgtttgcaaaatggtttcctttgagatgaatgatcgaaagaagattggattagggttaactggctttggtatatttttctcattcctcggacttatcttcttcttcgacaagggattgctagccatgggaaatgtcctgtttg

SEQ ID NO: 14245 - DNA, 275 bp, Glycine max
  Clone ID: 701068506H1
gaaagacattatatatatatgtgttatcatatatatatatatatatatatacatatatggtgtggcttaacgtctctatatatgttttaatgttagtgagaatactactcctaagggatatgtgatgcttggggctcatgtcattccatttcagttccatggtgtgctctatctcatcttacgtaacgttaattaattagttgttgcaaaaggctgtatttataattcagagaagtatctgtatctaatcatatgtctcctcttcttatgaaaaa

SEQ ID NO: 14246 - DNA, 277 bp, Glycine max
  Clone ID: 701068507H1
ctagattattgattcttgaacatgggttcttatcttcctatcatgccttggcaagttaaaacgttaattaggtttggctgtgtaacaaagtagcaaagacaaaatttaaaaggaaaatgcctaaaggattaaatgttagagtgcaagacatgcgaaaagtctccttacaaattcattcataagggtgatttacccagttatataaacccttatcatgttcattaactacttgatgtgggactcttaacacgcctcctcgagtcagggctcacctcaa

SEQ ID NO: 14247 - DNA, 276 bp, Glycine max
  Clone ID: 701068508H1
cgggatccctcttcgtagtgaattacattgcattgggttctagcagcgtatttcactcaccatgcaggctagtgataggtttaacatcaattctcagctcgagcatctccaagccaaatatgttggaaacggggacagcgggctgaacagacatgagaggggagagaacattcaacgtgatagctatgcatcatatattgggcactaccctttactgggattctttgctattgctgaaaatgaatctattggaagagaacgctacagctttatgca

SEQ ID NO: 14248 - DNA, 279 bp, Glycine max
  Clone ID: 701068509H1
cagagagagacggaggaaatgacagactggcaataaggaggacgaccctttggtatttggatcttcaagaaagagagaccttgggatttcgtcaccatgagtctcttcgggcttggaaagcagccgtctccaaaacactcgcccaaaaaagagcgctccagctggaagtaagggtgctcaacttcaaaaacacatagatgccacgttgggtagtgggaacttgagggaggctgttcaactgccccctggtgaagatattaatgagtggctagctgtaaa

SEQ ID NO: 14249 - DNA, 277 bp, Glycine max
  Clone ID: 701068510H1
gggcacgccctaaccccaaaccttcgtggagtcaccgaaaccaccacaagagcgacgcgaagatggagacaatcacgtgcgttagagggtgagtatcacttccattactatgtgcgacgtcgcatgcgaagatcagttacagctctatgaacgaaaaccatgggtgtcggcgagaagagcaacgcgaacggaaatcatgggtggtgatcccttcgacttcgaccctagcaacacaaatctggagtttctttcactttgttttttcggtttttgattc

SEQ ID NO: 14250 - DNA, 278 bp, Glycine max
  Clone ID: 701068512H1
gcaacagctacctcctccattcttcatttccattaccaaaaagaaaccaccaaactctctataaccataaccatgtcaatggcaacaacatcccctcacaccggcctcttccaaaaccgcaccaaaccttcttttcctttctcttcttcctccttcaagttcaaacccacatccatcaaatgccccacccaactccacacccaagctccgccactcacccactcccaagatcgcgtcttcaacttcgccgccggccccgccaccctcccggaaaacgt

SEQ ID NO: 14251 - DNA, 279 bp, Glycine max
  unsure at all n locations
  Clone ID: 701068513H1
ctcgagccggaaattttttaaacttgacatatctgctatcacctcttccgnttcttgcgaaccgacgatggccgatcaaaagctttcagaaccggcgcttaaacgtgagcagcttgatgaattcgtgagtagtctatattttgaacaacgaattcttgaactccgacttcttcaagacctcgagaacaatgatgaatgtaggaaaaatgggagcctgaaaaggttaaatgaccagagtgatgtctgtggatttagaagttgcttcaaaaatcattatga

SEQ ID NO: 14252 - DNA, 246 bp, Glycine max
  Clone ID: 701068514H1
cctttctctcgttttttctcagaaccttctgaggttaaagcaaaaaacaaagagagagagagagagaaaatgatgaagccatcgatgctcagatctctccactccgccgccacccgcggcgcctctcatctcttccgccgtgggtacgcctccgagccggtgccggagcgcaaggtagccgttctcggcggccgcggcgggattcgggcagcctctctcccttctcatgaagctcaatcccctcgt

SEQ ID NO: 14253 - DNA, 281 bp, Glycine max
  Clone ID: 701068515H1
ttgggattgatctaggttgggttcgcttgattacaccagaaaatgttctaagttgttattgctttactttggttggtgttggaattttactgacatgtctctgctggtttgttcgtcaattggttggatttctcatagcgaggggggatttttcaatgctattatgagtttcccatccaattacccaaatagtccaccttcagttaagttcacttcagagatatggcatcccaatgtatatcccgatggccgggtttgcatatcaattcttcatcctcctg

SEQ ID NO: 14254 - DNA, 283 bp, Glycine max
  Clone ID: 701068516H1
gaaaatttcaagtccaacactcacttcgtgcaggggtggtgctactagtttgttgaaagagcattttttttcaacatcttgatttcatgagtcactattttgactgaacaaagagatgaggtttatgcccctttccagattaatttgccgtctccctcggccgcatacacgtgggcctttgcaatctcgtgccttacagagtgattctgttcctaaagatccacaggctaagccaataaagtacagaatccctcaattctatgatccctatggccccagacct

SEQ ID NO: 14255 - DNA, 129 bp, Glycine max
  Clone ID: 701068517H1
cgagcacgcggatcggccgagaaagaatggggtctctaatggcctctgcagcattgactcttgtattggctatagtgtctctacagttggcaacacaagtcttagccgataactacttgtactcatgac

SEQ ID NO: 14256 - DNA, 271 bp, Glycine max
  Clone ID: 701068519H1
cgcagccataactgctttcatggaaataaaagagcataaaaaaaataaaatttaaatttcaggggttgcgcggttgtctattttcttagaattttgttggtaaataatgttatatttaaatgaacaagataaaaccattttgtcttggtatcaatgtggttgatgccaatgtgttatccactatttgttctgttcactgtgtaggcaggggtgataagatgataactgctcagtctttttttttgtagtcaataggaggcttgatgagtgg

SEQ ID NO: 14257 - DNA, 274 bp, Glycine max
  Clone ID: 701068520H1
aagtttcacgagtggcaaggcagatggttgagagatttggattcagcaaaaaaattggacaagttgccattggtggacctggtggaaatccattcttgggtcaacagatgtcatcgcaaaaggattactccatggcaactgcggatgtagtggtcgcggaagtgagggaactggtagagagagcatattctagggcaacacatattatcacaactcacattgacatccttcacaagcttgctcaacttctcatagaaaaagaaactgtggatgg

SEQ ID NO: 14258 - DNA, 272 bp, Glycine max
  Clone ID: 701068521H1
caattacatagcctcagtaatctgagagagacacaaaaacaatgaaggtttccattgccaagttccactcccttcccctatcttttttccttctcttggccttcaacacaaaacccctcctagcagcagaaccagagccagtggttgataagcaagggaaccctttggagccaggagtagggtactacgtgtggccactttgggctgatgaaggaggcctcacactaggccaaacaaggaacaagacatgccctctttatgttatccgtgac

SEQ ID NO: 14259 - DNA, 274 bp, Glycine max
  Clone ID: 701068522H1
acatgctctgttttcgtcacctgccggtcgctacattgtactggctgggttgaaaggcttcaatggacagttggaattttacaacgttgatgaacttgaaaccatggctactgctgaacattttatggcaacagatattgaatgggatccaactggaagatatgttgcaactgcggtgacttcagttcatgaaatggagaatggtttcaatatatggtctttcaatggcaagcatctatatcggattctgaaggatcacttctttcagttctta

SEQ ID NO: 14260 - DNA, 275 bp, Glycine max
  Clone ID: 701068524H1
ccagcatctgctgcaccaatggagactgacaaaccagagaacacaggctctgcttaatttttgttgattttgtctggtctctacgttttgtataacaatttgaattgtacctggaaaaatcgtcgtgggtgagagttgatgctgggattctttgctggaaaaattggtaatgggtgaattatctgagattcggattatttttggtcaaatctacgttctataagtggaattacaatgcttgtttacatttgagttaaatgaccctattttccttt

SEQ ID NO: 14261 - DNA, 210 bp, Glycine max
  Clone ID: 701068525H1
cgactgacgaccttgcaacaccggcgtctccctccttcctctcctctctctgcctttacctttgattgtaggtttttcattattttgcggcgaaacagggttgaatacttctgccttagcgcctccgctctcatctcccagcctagtccagcgcgaacatggtgatgcatctaaacgggacaccgtgcgctctcggattccacatgcctg

SEQ ID NO: 14262 - DNA, 278 bp, Glycine max
  Clone ID: 701068526H1
agagggatcattgacctgctgcgacgaacacgacgtcgtttttgtttccctctgtgagtgatgggattcttcaaaagggtagctggatttcttgggtttggaaaccacaaacacgattccaaggatgagaccgacgacggtcaacctcgagtgagagaaaccgtcgtcgatcgcccccacctcgctcccgttctcactccctctacttccggcgacggcggaattcagggtctggattggtatgtaaatcatcttaggatggatgaagatggtgattt

SEQ ID NO: 14263 - DNA, 130 bp, Glycine max
  Clone ID: 701068528H1
gcaagaatggcactccggtgcttcgtgatgtcccttgctgtgctcttactcttggtcttgcgagagaaagccatgccagagacgacgatttttggcacgctgtgtcgccaaacactcccattccaagttc

SEQ ID NO: 14264 - DNA, 279 bp, Glycine max
  unsure at all n locations
  Clone ID: 701068529H1
actacgagcgaatcggctcgagcattggaggctaggagtttccggtcaccntgcgttttaatctacgnaattcaaaagcatgggaccactccaatgtgtggaactctcatccaaagaactacggacctggttctcgcacctgccgtgtgtgtgggaatcctcatggattgatcaggaagtatgggcttatgtgttgcaggcagtgcttccgtagcaatgccaaggaaattggcttcattaagtatcgctgaaggattagtgttcaactgcccattcggt

SEQ ID NO: 14265 - DNA, 281 bp, Glycine max
  Clone ID: 701068530H1
ccttgctgatcctcatcatgggaaccatttttcctcctcactctctctctccactcctcaacatcaacccttcaccctcaagaattctcttggctccctctccccaacccaagtcaaattctctcttttgctccaaacccattgtttcaagtctcagaaagaaccaaacttcatctcccaaaccttcatcgggcacaagctggttggctcatgctcaacagggcctagcagctttggctatctccttggcactcaactttagcccagttttgtttaatggc

SEQ ID NO: 14266 - DNA, 282 bp, Glycine max
  unsure at all n locations
  Clone ID: 701068531H1
cctcgagataactagaaacagtgtgatgaaaatgaaggtccttgtcttcttcgttgctacaattttcgtagcatggcatatgccatgcgtacgatatgttccctctccgaatgaacactggctatggtgcccgtactccggaggtgaaatgcgcaagttggaggcttgctgtggaagcacacaccatctttggctttgagaccattcctgaagagtgcgttgaagcaacaaaggaatacatccatggcgaacaatatagatcagactccanaacagttaacc

SEQ ID NO: 14267 - DNA, 242 bp, Glycine max
  Clone ID: 701068532H1
tgtctgttgatccatctcttgtttcttgctttctttcttcaccatgtcacttgctgggaaaatcaccactgaaatcggggttcatgcaaccgctacaaagtggttcaacctcttcgcaacacaactccatcatgttcaaaacctaactgatagagtgcatggaaccaagctgcatcaaggtgaagactggcatcacaacgagacagtcaagcactggacttattacatagatggtaaggtta

SEQ ID NO: 14268 - DNA, 256 bp, Glycine max
  Clone ID: 701068533H1
gaagacacgtcttttcgggtccttctttcgcagaaaaagcgatgattgattgcttctctctccacaattcttgcgtactcttctcttctcttccccaccacactacacccctcctcagtacagaatttttatatttttaggtatggggaggctgtttgtgacccatctggaggggcagatctatacctgcaaacactgccgcacccacctcgctctctatgaagacatcgtttccaaggctttccacagcagacat

SEQ ID NO: 14269 - DNA, 270 bp, Glycine max
  Clone ID: 701068535H1
cttagctacaagctaaggacggatcaaagagaatggctcaagcaatggcatcaatgactagcttacgtggttcctctcaggctgtgttggaaggtagccttggctccacacgcttgaatgtggggagtggaagcagggtggcctcagtcacacgtgcagggttcacagttagagcacagcaacaacaagtgaatggtggtgaggtacaaagtagccgtagggcagtgctttcacttgttgctgctggtttgaccactggctcttttgttc

SEQ ID NO: 14270 - DNA, 272 bp, Glycine max
  Clone ID: 701068539H1
cagactcggaacagcaacgttgtagagggagacttttgggggagagtgagtgagagtaaaaagatgtttctgcgtgcggtggcgcggccgttgatggcgaaggtgcaggcttccccggcgcgccgcgccgcggtgcgccgccccccaccccgacggaggtgctgattgggctgtacagcaagacgctgaaagagatccagaaggttcccgaagatgaagggtaccgcaaggccgtggagagcttcaccaagcacaggctcggcgtgtgcaag

SEQ ID NO: 14271 - DNA, 274 bp, Glycine max
  Clone ID: 701068540H1
gcagcggcaacagaggagagaagatgaagttcaatccacgagtgtcgagcagccgccgcaagagccgaaaggctcacttcacggcgccgtcgagcgtgcggagggtgctgatgagcgcccctctgtcggcggagctccggtcgaagtacaacgtgcggtcgatcccagtccgcaaggaggacgaggtgcaggtggtgcgcggaacatacaagggtcgcgaggggaaggtgacgcaggtgtaccgtcgcaagtgggtcatccacatcgagcgcat

SEQ ID NO: 14272 - DNA, 275 bp, Glycine max
  Clone ID: 701068541H1
caataaagtaaaatagagttatcaattgtttcgcctaaattgtacagtgtggctcttgtctcttggtttgtgcttgtgtggttcgtgagcgtcgcgaatggcatctgggacgcagagtagtggaatgttaaccagagagcaactttattatcttttcgatcgtttcatttttcttacttcccaacctgatgtgaaaaaaaggattgcagaggctgtgcaggataagcaggaagctgttgctgtgaccactgcaatacaggaagagatatttttgg

SEQ ID NO: 14273 - DNA, 275 bp, Glycine max
  Clone ID: 701068543H1
cagaaagaagacatttccttccgaattgaggaagggaaaggtgtcttggatggccaagtcatcttccttagctatcacgttgatctgcgccgccacggtattggtggcgatcagtcggtggccgacagccgtgggcggcggggaccaccacttgggaatgggatgggtttccagcacgtgcaaggggaccattgctgattgcctgggaggggaggagtacgagttggattcggagatcaaccggcgcatctctagcaccaacaagtacatcagct

SEQ ID NO: 14274 - DNA, 277 bp, Glycine max
  Clone ID: 701068544H1
cagaagcagaacgaggagaagcagaaagaggagacgaagcaatggcgccgaagaagccccgaaccacgtcgaggaaccctgatttggtcaggggaattggcaaattcgaggtcgcagatgtaccacaagacgggcatctgggccatcaaggccaaaaacggcggtgttttgcccctccacgatcccaagcccaaacccgaggccccggcccagaagccgcccaagttctacccggccgatgacgtgaagaagcccctcgtcaacaagcacaagccca

SEQ ID NO: 14275 - DNA, 277 bp, Glycine max
  Clone ID: 701068546H1
gaagaagaagactcatctggaaccctttgggccgacagcgtgaagaagaagcggaagaagaagatgaacaagcacaagtaccagaagctcaggaagcgcatgaggagacagacgtagaaggtcagggaacagaaaaagcattcaactttatcaattcagttttctttttagtgaaactgtaatgttgtcgtctttgtttctattagtttttttttttttgggaagtgaaaagaagaattgagaggaaggggggagactgtgacattaagttggaggc

SEQ ID NO: 14276 - DNA, 288 bp, Glycine max
  Clone ID: 701068548H1
cgatcgaacgattcaagttacagaggaatcttacaagaggtgcaacattaaagacccgatattgtacatgaacaatggcaaatctttgtttaacattacatcaaagggccaattcttcttcactagtggtgagcctggccattgccaaaaaaatcaaaagcttcatatatctgttggtgaaggaataatagaaactatggatacagcacctggtccaagttcgtcattgcctgcatctgcaccctcctatcccacagtatttggcaatattccagtagctccttcaac

SEQ ID NO: 14277 - DNA, 270 bp, Glycine max
  Clone ID: 701068549H1
gataggcttaatgacaagtttgttgaattgggcgccattttggagcctggaaggcctgccaaaacagacaaggctgctatcctgattgatgctgtccgaatggtgacccagttacggggtgaagcccagaagttgaaagacactaatcagggtcttcaagcaaagattaaagagttaaaggctgagaagaacgaacttcgcgatgagaaacagaggctcaaggcagagaaggagaaactggagcagcagctgaaatctttgaatgcacag

SEQ ID NO: 14278 - DNA, 268 bp, Glycine max
  Clone ID: 701068551H1
attgtctgttgttgtaactcgttcttcttcttttgttgttctgtgtttgtgtttgtcttttctctcacctgaaaatgtcttgctgcggtggtaactgtggttgcggaagctcctgcaagtgcggcaacggctgcggaggctgcaagatgtacccagacttgagctacactgagtcaaccaccaccgagaccttggtcatgggagtggcacctgttaccgctcaatttgagggtgctgaaatgggtgtgcccgctgagaacgatggctg

SEQ ID NO: 14279 - DNA, 270 bp, Glycine max
  Clone ID: 701068553H1
gctgcatctcaacgaaacagagcgagctagagagagagagagagagaaagagaagagagagaagcagcgattcatcacaatgggtaaggttcacggatctctcgcacgtgcgggtaaagtgagaggacaaactcccaaagtggcgaagaagacaagaagaaaaagccacgcggacgcgctcacaagagaatgcaatacaaccgccgattcgtcaccgccgtggtgggattcggaaagaagcgtggaccaaactcctcggagaagtgaggg

SEQ ID NO: 14280 - DNA, 271 bp, Glycine max
  Clone ID: 701068554H1
catcgagataactagaaacagtgtgatgaaaatgaaggtccttgtactcttcgttgctacaattttcgtagcatggcaatgccatgcgtacgatatggtccctctccgaatgaacactggctatggtgcccgtactccggaggtgaaatgcgcaagttggaggcttgctgtggaagcacacaacatctttggctttgagaccattcctgaagagtgcgttgaagcaacaaaggcatacatccatggcgaacaatatagatcagactccaaa

SEQ ID NO: 14281 - DNA, 269 bp, Glycine max
  Clone ID: 701068555H1
aaatggtgaagacttgaataccaaggccctggatgcccctctattaaatggggatgacccattaccctggtggcagaggaaaaatgtcagaattagagagattgataatgaaaatgagtctaatggagtacccaatggtgctgcatccagtcagcagccaatccaacagccagttcaacgcgtatgggttcctcctcaacctccccccatagctatgccggaggtgcagaagcaatcaggcggccaaagccagcggcccaaaaggaaca

SEQ ID NO: 14282 - DNA, 274 bp, Glycine max
  Clone ID: 701068556H1
cacagccttcttcactcacaggaggtgaagatgtcgactccggctaggaagagactgatgagggattttaaaagattgcaacaagatcctcctgctggcatcagtggggctccccaagacaataatattatgctttggaatgctgttatctttggcccagatgacaccccttgggatggaggtacgtttaagttgacacttcagtttacagaggattatcctaataaaccacctactgtgcgctttgtttctcgaatgtttcatcctaacattt

SEQ ID NO: 14283 - DNA, 273 bp, Glycine max
  Clone ID: 701068557H1
ctcgagccgctcgagccgcaaactcacacactttgtactctccgtccttccttcttcgatccagatctctactcttctccctcaaatggcttcccttctgcaatgttccatgcccctcgtctcccctatccacgcgcgccgggacccgggaccaggatctccaacccaagttcagtttccctttcaattaagggaagaagtttcccatccgttacattgcagcccagagggcgtcggtttcagcttagatgtgcggcaaaaccagagacagtg

SEQ ID NO: 14284 - DNA, 275 bp, Glycine max
  Clone ID: 701068562H1
ctacaaagcattgaattcaaaaacttaagttcattccttgtgttttgctttcttcctcaaaaccaaacatgtcgaacacatgcggcaactgcgactgcgctgacaagactagctgcaccaagggaaacagctatggtgttattgtagagactgagaagagttacatcgagactgttgtcatggatgttccagcagctgagcatgatgggaagtgcaagtgtggcactaactgcacttgcacggactgcacctgtggccattaaggaatatgtatg

SEQ ID NO: 14285 - DNA, 278 bp, Glycine max
  Clone ID: 701068563H1
gtaagagtgagcaacttccaacaccatagtgaaatggcttccaaggctgcacttctcttgtgtttcaatgttctcttcttcaccgtggttagctccacatatgtgccatgcaacccaccccccaaaactccaaaacacccacctgtcccaaagccaccttccccaaagcaagcaagttgccccaaagacactattaagtttggtgtgtgtgctgatgtgttaggtttgatcaacgtgcaacttgggaagccaccaaagaccccatgctgcaacctcat

SEQ ID NO: 14286 - DNA, 279 bp, Glycine max
  Clone ID: 701068564H1
ggcggaatcgggcgaggaagagatagttggtaaacctgtccaagagctgctgttgaatcgcgaaaatctaccaaaaaattacatctacgaggaaggtggtgctggatttcgtgatgctcttgtgccatcacaggatgatgatattccggtgatcgaccttcatcgcctttcatcttcatccatctcacaacaagagcttgctaaactccaccatgcactccattcatggggctgcttccaggcaataaaccatggaatgaaaagctcatttctggacaa

SEQ ID NO: 14287 - DNA, 271 bp, Glycine max
  Clone ID: 701068565H1
aaggatgttaggaatattcatgtgctgcaggagatgtacaatcaatggcctttctttagggtcactattgatttagtggaaatggtgtttgccaaaggagacccagggatagctgctctttatgataggttccttgtttcagaggatctgtggtcatttggtgagcagttgacgaccatgtacgatgaaaccaaggaactcctccttcaggtggctggccatagggatcttcttgaaggagatccatacttgaagcaaagactgcgcttgc

SEQ ID NO: 14288 - DNA, 132 bp, Glycine max
  unsure at all n locations
  Clone ID: 701068566H1
ctcgcatcctccacgcaccgcgtgganttagtcgtcgctccgtcacggcagcctcctctcccgaaccacttccagaatcctctcattctccaccgattcgcccgccgtgggaggctccttcgacgcagcata

SEQ ID NO: 14289 - DNA, 267 bp, Glycine max
  Clone ID: 701068567H1
gttgggttgggtttttttgttattaaaagaaaagaaaaggggggatggctcggagagcagaggaagagtacgattatctgttcaaggttgtactgatcggtgattctggtgttggaaaatccaatctcctgtcccgattcactcgcaacgagttttgcctcgaatccaagtccaccattggagtcgaattcgctactcgcactcttcaggtggagggaagaactgtgaaagctcaaatatgggatactgccggacaggaacgataca

SEQ ID NO: 14290 - DNA, 283 bp, Glycine max
  unsure at all n locations
  Clone ID: 701068570H1
gttgagtgacaggctgatcgcgaattgagtcacgagttcagccatggtatctgtgtctctgcgcgtagtcctagggtggcgaagggagcagcccgagagactggggagtactcacnggcagagtgctcggacaggaatgatactgacgaaagcttatgccccgacagcgagaacctcatcgggggtcacctcgcaaaaatcttcagcccaggtctgtagcgcaatcgttcacctcgaactcggtggcttggggagagggcgaactccgtggcaacgccaccgt

SEQ ID NO: 14291 - DNA, 270 bp, Glycine max
  Clone ID: 701068571H1
caaatcctcacccattttcttcgtagccaaacactctgaaattctcagttatgtcgtggcaagcgtatgtggatgatcacctactgtgtgaaatcgaaggtaaccacctcactcacgtcgcgaacatcggccaagacggaagcgtttgggctcagagcaccaacttccctcagttcaaacctgaggaaataactgccatcaataatgactttaatcagcctggatcacttgctccaactggattgtatatcggtggcaccaaatacatgg

SEQ ID NO: 14292 - DNA, 241 bp, Glycine max
  Clone ID: 701068572H1
cgcagagatggcagttccccgagctgcacactggtcagaaaaatacaacaatgtggtaaagggaacgagtgaaaagggttctgccgtgtatggcgatttccctctgactcccaccgacgcgggagcgagagcgtggcaacagggctcagcgacgccaccgcagcacgcagcagggtccgcggcagagagttcttagagcactactaatagggtagctattgtcttcataaaatctgcttct

SEQ ID NO: 14293 - DNA, 272 bp, Glycine max
  unsure at all n locations
  Clone ID: 701068573H1
cttctgccaaccaacttctgctccctttttctgcaatgggttgtgctggatcttcacaatccaagcctgatggggcagtaaaaaagatccggaaacctaagccttggaagcatccccagcccancacaaagaaccaggccacaccaatacgcgatgagtcttgggatacagctcctcactatggtggccggaaagagatttgggatgctcttcgagctgctgctgaggctgatctaactttagcacaagtaattgtggatagtgctggggtc

SEQ ID NO: 14294 - DNA, 274 bp, Glycine max
  Clone ID: 701068574H1
ccgcttccatctcttctcacacctccatggccaacacttctcttccctacgccgatgccggcatggacgctgtccagcgccgtctcatgttcgaagacgaatgcattttggtggatgagaatgaccgtgtggttggacatgattcaaaatacaattgtcacttgatggaaaagattgaagctgagaatttgctgcatagagctttcagtgtattcctgttcaactcaaagtatgagttgcttcttcagcaacgatctgcaacaaaggtaacttt

SEQ ID NO: 14295 - DNA, 272 bp, Glycine max
  Clone ID: 701068577H1
tcgctgttaggcttttggagccactcaaagcggagtcccctattttgagctacgccgatttctaccagttggctggcgttgttgccgttgaggtcaccggtggacctgaagttcccttccatcctggaagagaggacaaacctgagccaccaccagagggtcgcttgcccgatgccactaagggttctgaccatttgagagatgtgtttggcaaagctatggggcttagtgaccgagatatcgttgctctgtctgggggtcaactattggag

SEQ ID NO: 14296 - DNA, 275 bp, Glycine max
  Clone ID: 701068578H1
accatttttctcttgcttctgcttctggtggccactgagatgatggggccaacaatggtggcagaagcaagaacttgtgagtctcagagccaccgtttcaaggggccatgtttgagtgacaccaactgtggctctgtttgccgaacccaacgtttcactggaggacactgccgtggcttctgtcgcagatgcttctgcaccaaacattgttaattttaaaaaattaattaagagtgctttgatagaagatgatagatctatcatctttctactcg

SEQ ID NO: 14297 - DNA, 277 bp, Glycine max
  Clone ID: 701068579H1
tttccttgcgtttccctttcattttccctcactttctcgctcgccaaacgcccctctctctcctccaatggccgaccagctcaccgacgaccagatcgccgagttcaaggaggccttcagcctcttcgacaaggacggcgatggttgtattactactaaggaacttgggactgtgatgcggtcactagggcaaaacccaactgaggcagaactgcaggatatgattaatgaggttgatgctgatggcaatggaaccatcgacttcccagagttcctc

SEQ ID NO: 14298 - DNA, 276 bp, Glycine max
  Clone ID: 701068580H1
gaagaaacttaatcgatcatcacttcacttcactaatacatcatggcagacgagacccagaacaagtatgagagctctgaggttgaggtccaggatcgtggtgtttttgactttctcggtaagaaaaaggatgaagaagacaagcctcatcctcaggaggaggtcatcgccaccgagtttcaaaaagtcactgtctcagaccaaggagagaacaagcacagcctcttagaaaagcttcaccgatctgacagcagctctagctcttcaagtgaggag

SEQ ID NO: 14299 - DNA, 280 bp, Glycine max
  Clone ID: 701068581H1
tgcggctcgaacaattctctagggtttatacaattctcgatggcttcttcagatgttgagtaccgttgctttgtcggtgggctcgcttggggcactgacgaccaagctctcgagagagccttctctcagtacggcgaaatcgttgaaacgaagattatcaacgatcgtgagactggaagatccaggggttttggatttgtgaccttcgcctcggagcagtccatgacacacgccatcgcagggatgaacggccaaaaccttgacggccgtaacatcactg

SEQ ID NO: 14300 - DNA, 209 bp, Glycine max
  Clone ID: 701068583H1
agagtttcttgtgagctataagctagtttatcgtgaggagaatatgaagttgtttgttctctttgttgctgcagtagttttggtagcatggccatgccatggcgcaggctaccaaaggttccctctccgaatgacaactggctatggtgagcgttcttcggaggtaaaatgcgcaagttttaggcttgctgtggaagcacacaacatcc

SEQ ID NO: 14301 - DNA, 264 bp, Glycine max
  Clone ID: 701068584H1
gcattgcatccctcttgatttgtagtttgttttgtgctttagataaaagttctgccaaatcaagaggggttttaagatcatagtgtgtgttttgcaacaatggctaagttctttgctgctatgatcttggcactctttgccacttccatacttcaaacagtggtaatggctgctaatgaacaaggaggccacttgtatgacaacaagagcaaatatggaagtggaagtgtcaagagttaccaatgcccatcacaatgctcgagg

SEQ ID NO: 14302 - DNA, 266 bp, Glycine max
  Clone ID: 701068585H1
aggatttcggccgtttgctccccaaggaaagaagcagagtgtttcttttgaaatcagctagaaaagatgtcaggtgaagaggtagctgttgcagctgaggcacctgctgcttcaattccaggtgagccaatggacatcatgactgctctacagcttgtgctgagaaaatctctggcctatggtggtcttgcacgaggtcttcatgaaggtgctaaggtgatcgagaagcatgctgcacagctctgcgttctagcagaagattgtga

SEQ ID NO: 14303 - DNA, 268 bp, Glycine max
  Clone ID: 701068587H1
tgctgctgctgctgcaaaacctagggttgagccttttgctcaggttttcagcgcttctttcttacaatggttctacagaacgatattgatttgctgaatcctccagctgagttggagaagagaaagcacaagcgcaagcggcttgtgcagtcaccaaactctttcttcatggatgttaagtgccagggctgcttcaacataacaactgtgtttagccactctcagactgttgtggtttgcggaaactgccagactgtgttgtgccaac

SEQ ID NO: 14304 - DNA, 272 bp, Glycine max
  Clone ID: 701068588H1
cggcaaggtgaggcgaaacgaaagagaaagagaatggagaagagggtagcaatattacaggaatggtttgaccgcgttgactcggagaaaagtggaagcataacagcggtgcagctaaagacagctcttgctgtgggcaacctggaatttccgctctcagtggttcagcaaatgatcaggatgtacgatttcgaccggaatggtactatgagctttcaagaatttgtttcactcaacaacttccttcttaaggttcaacatgcattttctga

SEQ ID NO: 14305 - DNA, 267 bp, Glycine max
  Clone ID: 701068589H1
catacctcctccaccgaaaaatgatgacggtggtgacacgggtatgcatacagggaaggacaaaactgagggcatgaagttttcacatcatagcaccactgagacttgtgacgggttcaagaagtgcatcgacgatgatgggggcatggttgcttgcatttcgaaaattgatcataaatacctagttgttcttcttcacaatggaggagacggcatcatcaaagtgaagcttcgtactgattttgataataaccttggagttgtaga

SEQ ID NO: 14306 - DNA, 272 bp, Glycine max
  Clone ID: 701068591H1
tggatttgcagcagagcgagttcgatcgcctcctgttcttcgagcacgctcgtaaggccgcagaagccgaatacgagaagaaccctctcgacgctgataacttaacaagatggggtggagctttattagagttgtctcagtttcagagttttcctgaatcgaagaaaatgacccaagaggctgtttcaaagctagaggaggcgcttgcggtgaatcccaagaagcatgacactctttggtgcctgggaaatgctcacacttcacaagcattt

SEQ ID NO: 14307 - DNA, 268 bp, Glycine max
  Clone ID: 701068592H1
gttcgacaatgagaattaattacgtaattaatttcagtatattattaatctacttcctaatgtctcttgatgtggagtgttatctcgacattttcatattatcatgttatatatgttgatggaacgaccctgcttaattttataattacatcaagatctgtcctggacttgaggatggtagcagtctattttgtgtcgttataataaactattcttttatagctgcattcattgaagggttttgtttttcgtcaagaacaaggatgat

SEQ ID NO: 14308 - DNA, 273 bp, Glycine max
  Clone ID: 701068594H1
gaaattgcctctttcaagaagcatctgagtgcttattatttgtaatatatatagtcactcaagcttctaggatttgtgccagctacatgaaaatgggaagcaacttcaggtttttgagtctttgcctcttggcattgattgcatcaacccatgctcaacttcagcttggtttttatgccaagagttgcccaaacgctgagcaaatcgttttgaaatttgtccatgaccatatccacaatgctccatcaccagcagctgcattgataagaatgc

SEQ ID NO: 14309 - DNA, 275 bp, Glycine max
  Clone ID: 701068595H1
cgcactgcggagagagaaattgagtttccgagataaccagttttctctttgattcatcaatggcaactgcgaggaccgtcaaggatgtttcgcctcacgatttcgtgaaggcttatgcttcccacctcaagcgttccggcaagatggagcttcctgagtggaccgatattgtaaaaacagcaaaatttaaggagttggctccatatgatcctgactggtactacattagggctgcctcaatggcaagacagatctatttgagaggtggtcttggt

SEQ ID NO: 14310 - DNA, 286 bp, Glycine max
  Clone ID: 701068601H1
gtttccacactgcataccttaggtcttccgaattcgaagttaatttgcaagatggctaaggaaaaaggtcagatcaacattgtggtggttggtcatgtggaccctgaggaggcaaccaccattaacgagctgaagaagcctgttgtggagaaagaagctccagggcatgccatatgagggcatgcacgtacggcctcggaggggaaccagaaaattatgttaacaaaataatctggaaccctaatgtatcagtgtcatcatcagtgtgtagtttaagctagctttg

SEQ ID NO: 14311 - DNA, 286 bp, Glycine max
  Clone ID: 701068602H1
ctttccattgatttcttgcttctatatattacttgcttcatttcctgatcatgtcccttgctggtaaaatccagtcctgaaattggcgttcaggcaaccgctgcaaagtggttcaacctcttcacaacacaacttcatcacgttcaaaatcttactgatagaattcatggaaccgagctgcatcatggtgaagactggcatcacaatgagtcggtcaagcactggacttataccatagatggcaaggttacaacttgcaaggagagtattgaatccgttgatgaag

SEQ ID NO: 14312 - DNA, 285 bp, Glycine max
  Clone ID: 701068603H1
cgattcccgatgcaattgtgttcgactcttatcaggtttatggaactcctagctattgggtgcaagaaacttttaattgaatccagtggagcaacatttattgactcgacactcagtacaacttcatctaataaacttgctgcatctgtaattatttggcaagattcttcagataagaaaaattacctaagaataaaggcagtaaactttggagcagccgctgagagtcttgacattgatttaagtgggttggactcaaatgtgcaacaatatggttctacaata

SEQ ID NO: 14313 - DNA, 283 bp, Glycine max
  Clone ID: 701068604H1
tgggtctcttccattcacaaccttaaacctttctttcttgtaaactttattgattgattctggagattagacttaggagggtatagacatggctagcgcaattgcagcttcttttttggttctgcttctggctttccccactgtatttggagctgaccatgaagttggtgacactagtggatgggccctcggagttaattacaacacctgggcctctgggaaaactttcacagttggtgacatttggtgttcaagtatgactccactcatcaagttgatgagg

SEQ ID NO: 14314 - DNA, 282 bp, Glycine max
  Clone ID: 701068605H1
aaagctgttactgctcctctgcacaatagagtccctaatcgtaatagggtggctaactggaataaaaccaagatttcaagttcctgtaggtcagagaagggctgctaatggaggctttgctgctaagcaaccacttccttcccctcagaagcagcaagagaatgtggatataatgccaaagcaaaagcctcagacgctggattcactgtttgcaaacatgaaggagcaaagaatgagagttttgtcaatgcagaataatgctgtgcaacgcaatggaggtgg

SEQ ID NO: 14315 - DNA, 281 bp, Glycine max
  Clone ID: 701068607H1
cttgtcacccaacttggtgtggtgtatgctattcatcatcatcatctaagatgctgagaaaactcatgagggttgtaattgttgctgatgttctttctgtgtttctcatatgttctctctgtctctgctattcctgcaacaagaacccaaaatttgaaaggcgaagaagaagaattttcagccctgccttctttaactaggttggatcatgtggttggaaatggtgaggtggtgctcgttgacatgaatgaaggattcatggagaggagggtcgatttgga

SEQ ID NO: 14316 - DNA, 283 bp, Glycine max
  Clone ID: 701068608H1
gtgagatatgggtgttatgcagccaatgttatcatccaaaggcctggctgcaccataccagagaaggctgattttccattaagtgatttctccttttctgttactgctatgaattattattattattttctatcattgagaagaattttaacagccacactctaactggtgtggggttttttaatcccccgtctagggaaaacaacgtgaaacagttgcaggacaagagataaaacttgaataagttcatatatttgaagtccgatcaggcatcaattctcaa

SEQ ID NO: 14317 - DNA, 247 bp, Glycine max
  Clone ID: 701068609H1
gctagtttctgtctgacagctattctccaccgtagccgcaagttccgccgattgaaacagtgcttcaacaatggcagaccaaacagagaaggcttttctgaagcaaccaaaagtgcttctatgctctaagaaaggtgggaagggaaagaggcctgggaaaggtgggaatcgcttttggaagtcaattgggcttggattcaagactcccagagatgccattgaaggaacatatattgacaagaagtgc

SEQ ID NO: 14318 - DNA, 280 bp, Glycine max
  Clone ID: 701068610H1
ctgacagcctccaaatccaatggcttcagagaagaaactttcgaacccaatgagggagattaaaatggcagaagctcgtcctcaatatctctgttggcgagagtggagatcgtctcaccagagccgccaaggtgttggaacaacttagtggccaaaccccagtgttttccaaagcacggtacactgttcgttcctttgggattagaagaaatgagaagattgcatgctatgtcactgtcagaggtgacaaggcaatgcaacttttggagagtggtttgaa

SEQ ID NO: 14319 - DNA, 277 bp, Glycine max
  Clone ID: 701068611H1
cccgcacgaatatcttgttgtttggagcgatccgagacaaactctgtaaacatgttggtttaccaagaacttccttacaggtgatgagcttctctctgactccttccgttacaaggaaattgagaatggaatgctgtgggaagttgaggggaagtgggttgttaaacgagcagttgatgtagacattggtgcaaacccttctgctgagggtggaggagaagatgagggagttgatgatgcagctgttaaggttgttgacattgttgacacattcaga

SEQ ID NO: 14320 - DNA, 277 bp, Glycine max
  Clone ID: 701068612H1
cataacaaggttatgcttttgggtcacagtgacactttcactagggacaagaacatgcaagtccacaatggccttaacccattttggagaagggctagtgcagagaatgccaagatgcaggcatggatacttccatgtggtgaacaatgactacacccattggagaatgtatgccataggggggagtgctgtcccaactatcaatagccaagggaatagatttcttgctcccaatgacaataccttcaaagaggtgacaaagagggagaattcacca

SEQ ID NO: 14321 - DNA, 276 bp, Glycine max
  Clone ID: 701068613H1
ctcgcttctaacgtcaccgactcagttgttgtcagcgagtgagtacgtcgtttctctggagcaacaaaggttaagccattccaaacagacgagaaatgggtcgtggggtcagtgctggtggtggtcagagttccttaggttatctctttggcagtggggtgcctgccagcagtgcaaacagtcagcctgcaaatggtgctcgcactcaaaatgctagtgctccttcaccaccagtcgataagcaaagtccagcaccagcaccagcaccagcaccag

SEQ ID NO: 14322 - DNA, 122 bp, Glycine max
  Clone ID: 701068614H1
atcttcccaaaatcatataattctctttcatctgaagtttccctttcaaatctcgtcctttgaaggtttcggaagtccccggcatcatggagatggaacgagtcttcgagtttccacacaac

SEQ ID NO: 14323 - DNA, 278 bp, Glycine max
  Clone ID: 701068616H1
gctagaatggaatttcgatgctcagtcatctcttttaccattctcttctctcttgctcttgcaggagagagcccatgtccatggaatcggttacttgaggaagattattgggaagctgtttggccaaacactcccattcccactgcactgcgagagcttctaaagcctctccctgccggtgttgaaatcgatgaactccctaagcaaattgatgatacacagtacccaaaaacattcttctataaagaagaccttcatccaggcaaaacaatgaaagt

SEQ ID NO: 14324 - DNA, 282 bp, Glycine max
  Clone ID: 701068617H1
atcaatctaagggtaaaggaggttttgtcagaggcaagcttcggttcaaggccgtctcaacacgtactcggcctaaggttcctaagcacattttacaccatgaagagtgataactctggttcgctttgtggacccgtcatagatgatgtaaaattgcttggtgttcgttatcccacacatgcttgatgatgaggtttcaatcaaaacacgtacatgtgctacattcatgtagttgagcatatataccacaggattcttgtaataataggagggtttactatt

SEQ ID NO: 14325 - DNA, 110 bp, Glycine max
  Clone ID: 701068618H1
gccctatgggcaaatgccaagtgacaagacagttggcggtggtgatgatgctttcaatactttcttcatcgagactggtgcttgactgcacgtgtcacgtgcagtctttg

SEQ ID NO: 14326 - DNA, 281 bp, Glycine max
  Clone ID: 701068620H1
ggaactaatgtacttgcccttggtactgatgtttcttttgacaccaaaattggggagttaactaaattcaattgttggactgaacttcaccaaagacgatttggttgcctcattgactgtgtgagtaattattgtcctcttttgagaggatgcttctaattggagtttcagcatttatttcatttgcctcatttagatttagtcttttacatgtgggaactatggaatttttaaattaatcttgagcttgtttgttcttttcttctgctagtgaagtactt

SEQ ID NO: 14327 - DNA, 280 bp, Glycine max
  Clone ID: 701068622H1
atcaaattagttcattctctttgcgcagttccctacctctcctttcaagatgcagattctcgtcaagaaccttaacgggaaagaccatcacccttgaggtggaaagctctgacaccatcgacaacgtcaaggccaagatccaggacaaggaaggaattcccccggatcagcaacgtctcatcttcgccggaaagcagctcgaggacggccgtaccctcgccgactacaacatccagaaggagtcaacccttcaccttgtccttcgtctccgtggtggcat

SEQ ID NO: 14328 - DNA, 279 bp, Glycine max
  Clone ID: 701068623H1
gaagagcaaggttacaggcacaattttcacagatgaggcctgttgcaataacgccttctgttgcggcccggaatgcctctctaccctcctggtgctcctggtcttggacaacaatttttgtatgggcaaggacccccagccatgatgcctccacaagctggatttggttaccagcagcaactagttccgggaatgagacctggtggtggtcccatgccaagcttctttgttcccatggttcagcagggccaacaagggcagcgcccagtgggccgccga

SEQ ID NO: 14329 - DNA, 278 bp, Glycine max
  Clone ID: 701068624H1
cgtttacacatctctccaacctctcactttcgtttctcagttttattcgaatccctctctcaatcccccttccaaaatggccagcgttgaggttgcacagcaaacaccaacaacagttccagaaaatgaaacaaccgaggtaagcaagacccaggaaacaaccccagtcactgaggctcctgcaacagaacaaccagcagctgaggttcctgcaacagaacaacaaaccgctgaggctcctgccccagaatcaaccaccgaagcaccacaggaagaaa

SEQ ID NO: 14330 - DNA, 279 bp, Glycine max
  Clone ID: 701068625H1
tggtgcggcgcaagcgtggtgaggcctccaccggaaaattctccgtccaaacggagaagaagaccttcttcggttggaatgttgtaagagataggttttctcttccaaagactcttccaattgcacgatctgtattctaacattccacatagttacttggagtgggaaaggtggaaaagaactctacttgaagagattaataactataatgccagcatactgtgtttccaggaggttgttcactttaatgatctagatgatcttttccagaacagtggc

SEQ ID NO: 14331 - DNA, 273 bp, Glycine max
  Clone ID: 701068626H1
ctttgtgccacttttcatgtctccttctctattatcgacggtttagttgccaacggcaatttgaagttgggtcaaaagccctccgccctaaaaggaacagtggtggtgggcgggagccactcgatcccagaatgggagatctccggctttgtggagtacataacatccggccaaaagcaaggggacatgttgctcgtcgtcccagagggtgcctacgcggtgcgcctagggaacgaggcctccatcaagcagagaatcaaggtgatcaagggc

SEQ ID NO: 14332 - DNA, 276 bp, Glycine max
  Clone ID: 701068627H1
atagagtatagagagcaacataggaagtgaagtgtaggtacatgagagccatgacagggtttatgaggccccgttcaaagttcttcatgtgcagcttgcaagctattgaagagaagatgcataccaaattgtatttttgcaccttactttaggtctgatgagtgcaagaagtttgcaaaggtgcacaaggtgtttggagccagcaatgtgagcaagattctgattgacgtgccagaagagcagagacaggacacggtgaattctctggcttatgag

SEQ ID NO: 14333 - DNA, 226 bp, Glycine max
  Clone ID: 701068628H1
tgtgatagattgttgggctcttacaaggttaaaccagtcgttaaattgctgaaacaaactctagttggggacaggagcattgcttgttacaggagttatgctatttatctttgctacaccattggagaatttttttcgaactacctttaccaaagaagaaattaaatcaactgttcaagctcccaaggttaacacaaagctcttaagaaaagaggagctgcttaaa

SEQ ID NO: 14334 - DNA, 270 bp, Glycine max
  Clone ID: 701068629H1
tgctttgtaccattgacagtcacctcagtacctgcatcttattgtgaaggatgatgacatggtggtaatcttgaaactgatgacatcaaggatcttaaacccttgaatgatagagtcctcataaaggttgctgaagctgaggaaaaaacctctggcggtttgttgcttacagaggcaaccaaggacaaaccttcgattggaacagtgatagctgttgggccggggcatctggacgaggaaggcaacagaaaaccgttgtccgtgactccg

SEQ ID NO: 14335 - DNA, 274 bp, Glycine max
  Clone ID: 701068630H1
tttccctgaaccagcaccatgccctcgtcgtcctctctccgtcgccgtcttcacccgctatcggcgtcggatcaccccacggcaacggagcatcgctgttggagaccacaccacgccgcttctggattccttcaaaaggggggtttgggagtgacgaaccagaaggagaaagagttgttgttgggggataggggtggtggggacgaggagggtttgggtctgaatttggttccttccaaatcaattctctcaacaacaacccaattccattcca

SEQ ID NO: 14336 - DNA, 285 bp, Glycine max
  unsure at all n locations
  Clone ID: 701068631H1
gacatacttccacaactgactttgctaattacncggtgangttcgtgtcggccacgagtcattcgtcaataaagcaaaactggttaagcctaaggggatattggattcgtcggagttctattccacgagtcgacggctgagataagtcttgcaagaactaatacatggcacgatgactgcccaatacagatcaggcattccgtctgaatcgggccacattcagtgcgggggaaaggcgttcttccgatgctacttctgatctctctatatttgtgggggacttgg

SEQ ID NO: 14337 - DNA, 187 bp, Glycine max
  Clone ID: 701068632H1
ttcggctcgagcacaaatagtctcaagatagattaggccaagagtatttgatgccgatttatctaaggaaaagaaaaaggctaaacgaaggtgataatgttgtagaagaggctcccgcagatataccagctttgctggagttgaagcagatatattacgaactaatgagtcggtattattctcataa

SEQ ID NO: 14338 - DNA, 281 bp, Glycine max
  Clone ID: 701068633H1
ctggaacagattctggcatcactgcacaacatttggagtgggttcatcggaagacacttcaaatggtttcaggagatagcatatggctagttctctctccttttttcttatgtgaattatatatataagatcaagagtggcagacatcagaattcctggactatgctttgggctgtttggtttctgccagcacttaaccatcatttgaggtatttgtcatggttctgctgattttcaaagttaatttgcatattaggtgttctctcccctttgaaagggtt

SEQ ID NO: 14339 - DNA, 274 bp, Glycine max
  unsure at all n locations
  Clone ID: 701068634H1
atagtgcaaaatgctattatgtcatgggagatggagctctcacacaagacccggttccangaacttaaagacaataaacccttggaagttcaagctctttgtgaatggcagggaaggattatctggagaggatactctaagcctgggaagttataatgctttgttgcaaagttctctgcctgaagacttgaagccttacaaagcagatgaagagacttttgaatcatctcatgaagcgttcaaatcagctttttctagagggtttgcttgggaa

SEQ ID NO: 14340 - DNA, 280 bp, Glycine max
  Clone ID: 701068636H1
gaaagatgtcgaagcgtggtcgtggtggttcggcggggaacaagttccgcatgtcgctgggtcttccaatggccggcaacggtgaactgcgccgacaacacgggggcgaagaacctctacatcatttcggtgaaagggatcaaaggccgtttgaaccgtcttccctcggcctgcgttggcgacatggtgatggccaccgtgaagaagggaaaacccgatctgaggaagaaggtcttgccagctgtcatcgttcgccagcgcaagccatggcgccgaaagg

SEQ ID NO: 14341 - DNA, 277 bp, Glycine max
  Clone ID: 701068638H1
aatttttattattgtatttccgtggaattgggtcgaattaattacagcaattggactgtataaggattaaggaaggaaggaaggagaagcagaaaaaaggggtgggagggattattattacttttgtgttgttgttgggttcctgaaattctcttggccgttgtgtaagcttatatatgaaacgctctatgccctttggcaccatacataaaaacgttcgaagaacgagaaaccttttatgtgtattttggcgagggaggaaaattctccctccctg

SEQ ID NO: 14342 - DNA, 238 bp, Glycine max
  Clone ID: 701068639H1
gtgaacgcgaagtccatcacaacgacatatttatattcggcatagataacaccgtactctctaataatcccatattatgaaaaccatggatatggggtggaggaatttaatgaaaccttatatgatgaatgggttaacaagggcgacgcaccggcattgccagagactcttaaaaattacaacaagctgttgtctcttggcttcaagattgtattcttgtcaggaagatatcttgaca

SEQ ID NO: 14343 - DNA, 278 bp, Glycine max
  Clone ID: 701068640H1
cgctatggggaagctctctcttaagatactgttgttgaataatcaacacttgggtatggttgttcaatgggaaggatcggttctataagtctaacagggctcacacatatctgggagacccctctaatgagaatgccatataccccaatatgttgaagtttgctgatgcttatgggataccggcagctcgtgtgaccaagaaagaagaccttagagcggcaattcagaaaatgctggagacccctggcccctatcttcttgatgtcattgtaccccaa

SEQ ID NO: 14344 - DNA, 278 bp, Glycine max
  Clone ID: 701068641H1
atcatattcctctctcattctcactataaacacaaaacccttcccatcctaattaaggtgaaaatggagggattcacccattgcttggttcactttggtggttgtgtttcttgtggctgaagttcaagtttcaatggcagtgacatgcagcccagtgcagctgagtgcatgtgtaagtgcaataacctcttcaacccctccatcaaacctatgctgctccaagatcaaagaacagaaaccatgcctctgccaatacctcaagaaccccaatctcaaga

SEQ ID NO: 14345 - DNA, 275 bp, Glycine max
  Clone ID: 701068642H1
cttctatctctctcttcaattccaaaaccctacccccatccaattccaattcaccctcaatcatggggtcctgaaggttcaactgtcgtcgttcctaggaacttcagattattggaagagcttgagagaggtgagaagggaattggagatggaactgttagctatggaatggatgatgctgatgatatctacatgcagtcctggactgggactattattggcccccctggtactgttcatgaagggcgtacataccagctgaaattattttgtgg

SEQ ID NO: 14346 - DNA, 275 bp, Glycine max
  Clone ID: 701068643H1
gtggtgtgggggttgcattgcagtatcatcagaatcagcgttgagttgaccccttcatttcattaactaatcacccttaacaatgcaagcagcaattgcagccatggccgcccacactattctcttttcttccttcccagctcctcaatccattgcccttcccgccactaccaagaaagccgttgcaatcctcaagggcaattcctccgtccatggccttgtcactctaacccaacaacaagacaacggcccaacaactgttactgttcgtgttt

SEQ ID NO: 14347 - DNA, 274 bp, Glycine max
  Clone ID: 701068644H1
ggcgagttgagagagaatgggaaggaagaaggggtatgttgagttcgaggagtcgccgccggacgaattcggatccggggcatcggtacaaggacccggtggcgatgctggagatgagggagcacatcgtgagggagaagtggatccaaatcgagaaggccaagatcattagggagaagctccgatggtgctaccgcatcgaaggcgtcaaccacctccagaagtgccgccacctcgtcaaccagtatctcgagtccacccgcggcatcggttg

SEQ ID NO: 14348 - DNA, 273 bp, Glycine max
  Clone ID: 701068647H1
agaattgttacattgaattaaaataataggaaaagaagaggctccagttaggcaattatggcttggtcccatccaattcgcaaccaggaaatggatgtggttccttatccagtaacacccccaaacctcatttctctgccacatgaaccctcccaaacacagaaaccatcgcaaaaagaaacccagattattgattattaataatggaagccatattcgtcaccaaacccgcttcccattctctcctcttaactaaactctctccgaatccca

SEQ ID NO: 14349 - DNA, 279 bp, Glycine max
  Clone ID: 701068649H1
cttctacctctcaagtttttgaagtatagacctggcagagacattcctatttacctcagagtcaatgaacggagggacaccctgacaagctctgtgaccaaatctctgatgctgtcctcgacgcttgcctcgaacaggacccagacagcacggttgcctgcgaaacatgcaccaaaaccaacttggtcatggtcttcggagaaatcacgaccaaggccaatgttgactacgagaagatagtgcgtgacacctgcaggaacatcggctttgtctcaaacg

SEQ ID NO: 14350 - DNA, 276 bp, Glycine max
  Clone ID: 701068650H1
gtattgctggcgctgtagctcaaactgcaatatcccatggatcttgttaaaacaagactacaaaccccatgcttttaaaagtggaagaattcctagtcttggaaccctttcaaaagatatatgggttcaggaaggaccccgggcattttataggggattgattccttctcttcttgggattatcccttatgccggcatagatcttgctgcatatgaaaccttgaaggatatgtccaagcagtatattcttcatgatggagaacctggtcctctagt

SEQ ID NO: 14351 - DNA, 279 bp, Glycine max
  Clone ID: 701068651H1
cacaattccaatctgtcaaatatataaaaccaatacgccaccacattagtaaaattgcatgcagtggaaaacacactccgaaggagaaaagctcccacatcggaggaacgttctacttggcctaggaggattttgcggcgctgctgttatgtctctgaacaacaagaacataccttttgcctctgctgctcccacacccatgttccctctggtgttggattccgctgtgagcacggtggtgaagaggccaagcaagtcgaggagcaagaagcagaagga

SEQ ID NO: 14352 - DNA, 276 bp, Glycine max
  Clone ID: 701068653H1
gagattacccatagatagagagcgcggcataacctaaacttacccttcttctctctgtgtgtgtgcgaatcaaaggcaaccagaagcagccatggccactgcaagaactgtgaaggacgtttctcctcatgagttcgtcaaagcttactcttctcacctcaagcgatctggcaagatggagctgccagagtggactgatattgtgaaaactgcaagatttaaggagttggctccttatgatcctgactggtactatgtcagagctgcttccatggc

SEQ ID NO: 14353 - DNA, 272 bp, Glycine max
  Clone ID: 701068654H1
caaagatgaagatgatccacgttcttttcctctttgctcttgtctcgttcaattcccatgctttctgtcaatggattcctgtgtagcagacctaaaaggtccagatagcccttcaggctatcagtgcaagccacctaacacagtcacagtggatgactttgtgttctctggctttgtagctggaaacaccacaaacactttcaatgctgcattaacctccgcatttgttcatgattttccaggtgtgaatggtcttggtgtatctgtggcac

SEQ ID NO: 14354 - DNA, 266 bp, Glycine max
  Clone ID: 701068656H1
aaacttgcaaccaatggacatgaactaaaggcatcttttaatgcagatgatctcgaaaaacatggaagacttaatgaatttaattactgatgctgctgctgtagcatttcaatatggtaatcctgataaagaatgcaagcctatggttgaagcaaagaatgctggagaggacttggtggatgcttatgccaaatacgtcaaagagtactacattggaacctttggtgttaatgtgcagacttatgaccaggagtacttgaagaaaa

SEQ ID NO: 14355 - DNA, 274 bp, Glycine max
  Clone ID: 701068657H1
tgatcaccatggccacttcaacttgccactcaagataactccttcaatgagtagccttgaggcacttctcctcaaagttcccctcagtggtgccaccaacaacaacacaacaacaaccactcttgccatctaattcccagcaacaacaacgacggccattggagttcatcatgggaatgcagaaagtggcaaaggaagagttggaacaagaagaggtgtacaggccagaacttgacataggtgagagtagcagctccttgccaggaggagggta

SEQ ID NO: 14356 - DNA, 270 bp, Glycine max
  Clone ID: 701068658H1
cagtggatatatgggtttgtgatctttttcttccctggtgggactccagacattagacgcgctccactttccttggaaggcgctatttgggctgtttgtatttgtcttggctgtgggcactgctgctcttgggtttctggagaagctcactttccttgagaactcaggattggacaaatatggttctgaggctttgcttgtcaacttcactgccattatcacaatcttatttggtgcctttgttgtgttatctgctctagctgatgctcc

SEQ ID NO: 14357 - DNA, 272 bp, Glycine max
  Clone ID: 701068659H1
gtaacccaaaaccctagcggcgcctgctttcttcgttcgtcttttgcatcagccatcaggatggaatcctcaggtgaagcatgctcttgttgtcaaagttatgggtcgtactggatccagaggacaggtgactcaggttagagtgaagtttttggatgatcagaaccgtcatatcatgaggaatgttaaaggaccagtgagagaaggagacattctcaccctactcgagtctgaaagggaagcaagaaggttgcgctagagggtattttttt

SEQ ID NO: 14358 - DNA, 270 bp, Glycine max
  Clone ID: 701068660H1
ctagtttatcgtgaggagaatatgaagttgtttgtcttctttgttgctgcagtagttttcgtagcatggccaaggccatggcgcaggctaccaaaggttccctctccgaatgaacactggctatggtgagcgttcttcggaggtaaaatgcgcaagtcttaggcttgctgtggaagcacacaacatacgaaccaaaaaaaccattcctgaacagtgcgttgaaccaacaaaggactacattcatggcgaacaatttagatcagactctaa

SEQ ID NO: 14359 - DNA, 128 bp, Glycine max
  Clone ID: 701068661H1
ctcttctactcttgcggctaaggttttagcgcagttacttctagatctaaggaagatgggcaaaggaaatggttcacatcagaattgtggtaatcggccacgtcgactctgggaagtccacaaccaat

SEQ ID NO: 14360 - DNA, 271 bp, Glycine max
  Clone ID: 701068663H1
gcgcaccacactgagaggaagagggagtgagagagagtgttcttcgtttgctaccttctcccagaaatgggtaacgtccaggtttcaccagtaccaggtggtcgggagggctctcccaacggaagcagatcagcatccgaagatctaccgaatgaagctctgggccaccaacgaggttcgcgccaagtctaagttctggtattttttgaggaagctgaagaaggtgaagaagagcaatggtcaagttcttgctatcaacgagatttttgag

SEQ ID NO: 14361 - DNA, 271 bp, Glycine max
  Clone ID: 701068664H1
cagaagggtatatatgcaagtttactggggttgagtgttggcaccctgatgaaaacaaggtcttgaatctccaaattgtcaaacatgggattcaagggccccttccctcgcggcattcagaattgttcaagcatgacaggattagatttttcgcttaacagactctctaaaaccattccggccgatatatccacacttcttacatttgtgacaacccttgatctttcttcaaatgattttacaggggagatacctgcatccctttcaaatt

SEQ ID NO: 14362 - DNA, 277 bp, Glycine max
  Clone ID: 701068665H1
gttagggtttgtaactttgtcttttgcttgcgaatctgaatcgaataataatcaatcaatcatcatggccgtcggcgaagaagatcacactgaagagttcggacgccgaggctttcgaggtggacgaggcggtggcgctggagtctcagacgataaagcacatgatcgaggacgactgcgccgacagcggcatccctctgccgaacgtgacgagcaagatcctggcgaaggtgatcgagtactgcaagaagcacgtcgaggccgcgaatcccgaaga

SEQ ID NO: 14363 - DNA, 277 bp, Glycine max
  Clone ID: 701068666H1
cgaagatttagggtttcgcattgctacttcgcgttcgttcatctctctctcacgcctccaagatttccaagaccagattccaatctggattccattccattttgtacagccttcgataggagtaaacctttgcagatatgggacaaagaagttgtgaatgcccatgttaaacgaccacaggatgaagacatacaatccaatgtactggaaataattggatcaaatattcagtccacatacattacatgctcagctgacccagctgcaacacttggta

SEQ ID NO: 14364 - DNA, 275 bp, Glycine max
  Clone ID: 701068667H1
cgagataactagacacagtgtgatgaaaatgaaggtccttgttttcttcgttgctacaaatttgggaagcatggcaatgccatgcgtacgatatgttccctctccgaatgaacactggctatggtgcccgtactccggaggtgaaatgcgcaagttggaggcttgctgtggaagcacacaacatctttggctttgagaccattcctgaagagtgcgttgaagcaacaaaggaatacatccatggcgaacaatatagatcagactccaaaacagtt

SEQ ID NO: 14365 - DNA, 275 bp, Glycine max
  Clone ID: 701068668H1
cagagaggggtttcagtgagtgatcggtgttcacttgatccttcataagtcgtcatcatcatcaacatgaaccacggttgattgaagaagatgccaatcagaaacatcgccatcggaaggcctgaagaggctactcaccccgacacgttgaaggcggggttggctgagttcatctccaccttgatcttcgtgttcgccggttcaggttccggcatcgcctacaacaagctcaccgacaacggcgccgtccatcccgccggcctcatctccgcttc

SEQ ID NO: 14366 - DNA, 272 bp, Glycine max
  Clone ID: 701068670H1
cgtttctgcgaggcttaagacacctcgcagaaccaaagaaaactcactctcacacacttatggttcataaaaagcctttcacttcaatcttcaagcttgctagttcctactcccaaattatagtgaccttttatcccaagtcacttaaatttacaacctttattacagctcatacttgattatcgctttgttaagttttaacacaatggcggcacttctccagttatagccatgaagctatggaatgtgttgaggatcaccttcttcatgat

SEQ ID NO: 14367 - DNA, 270 bp, Glycine max
  Clone ID: 701068671H1
tgggagaattaggtttttagggtttacaccgagcagccacacctcccggagcagccatgggtctcaaaatggacttatgccgattcagtggtgccaagatctacccaggaaagggcatcagctttgttcgtggtgattctcaggtttttctgtttgctaactcaaaatgtaagatgtcatttcacaattgcctgatgtcttcaaagctcacctggactgcaatgtacagaaagcaacacaaaaaggacattgcacaagaagctgtgagga

SEQ ID NO: 14368 - DNA, 273 bp, Glycine max
  Clone ID: 701068672H1
cacgaatatcttgttgtttggagcgatccgagaaaaactctgtaaacatgttggtttaccaagaccttccttcaaggtgatgagcttctctctgactccttccgttacaaggaaattgagaatggaatgctgtgggaagttgaggggaagtgggttgttaaaggagcagttgatgtagacattggtgcaaacccttctgctgagggtggaggagaagatgagggagttgatgatgcagctgttaaggttgttgacattgttgacacattcaga

SEQ ID NO: 14369 - DNA, 271 bp, Glycine max
  Clone ID: 701068673H1
aaaccctcttcatcttgttctatctgtgacgagcatcatggcctcaagagcagtgttattgttgggtaagtggtgtgcttccggcgatggttgtggccattcgcccagcaaagaaccctttttgcgtgaagggtcgtgtctactgtgacccttgccgtgctggttttgagacctcagctaccacctacattgctggtgctgagattatgttgcaatgcaagagcagggttagcaacgaggttgtgtacacgaagaaggggtacaccgactc

SEQ ID NO: 14370 - DNA, 271 bp, Glycine max
  Clone ID: 701068674H1
gttcaaacaaatcaaagccatggccacctccaacttctctattgttctctccgtctccctagccctccttttgggtgttacttaccaaggcacactcgaccgataccgtttctttcaccttcaacaagttcaacccagtccaaccaaacattatgctccaaaaagatgctagtatttcatcctctggggtgttacaactcaccaaagttggcagcaacggcgtgcccacctcgggatctctcggtcgtgccctttacgctgccccaatcca

SEQ ID NO: 14371 - DNA, 247 bp, Glycine max
  Clone ID: 701068675H1
gcgagtcggtgctccttcgccacaactctcagaagacatgagcatctccagagattccatgaaacagcacgcgtgccatgggtggcaagaagaacgcctggaggaaaaggagacagtatgagcttggtcgccagcctgctaacactaagctgtaaagcaacaagacagtcaggaggatccgtgttagaggtggaaatgtgaaatggagggcatcgagattggatactggaaattactcctggggaag

SEQ ID NO: 14372 - DNA, 270 bp, Glycine max
  Clone ID: 701068676H1
agacaaccacctcgacgaaatcgaaacggctaacaacatcaacaagcgcctcaagccatctccaaggggattcagcagactccgccgcgtctgagcccacgcgccatgtcgtcctcgttgaccatcaggaagccggcgtgcgtctcgtccacactctcctggcgtcacgcggaggccgttcagcaggagaatctcaagctcgcggacgcgctcgtcaagcacgtgggcatactcgcggcttcccaagccggcgccatgaggaaggttgct

SEQ ID NO: 14373 - DNA, 265 bp, Glycine max
  Clone ID: 701068679H1
ctcgagccgctcgagccgcttcgtcaacgttacttttccacctcgtacgagggctccaattgacagggaagcggctgatggcagacaacacacagtcttactgggaaggctacaaagcgttttggtcagagaggttttcctttttgagcaactattcgaggttcatcaaccgtgataaacccatcccttcctggtcaagctctgatgtcgaggagttcattgcttctgatcctgttcatggacccgtcctgaaaagtgctagaga

SEQ ID NO: 14374 - DNA, 265 bp, Glycine max
  Clone ID: 701068680H1
cagtgtgtgtgagagagagaaggatttggaattttggataactagagcgaaagcttgacggcaccaaaaaccgactgttcccagatctctctctctctctctctcttccaacaatccaaatccaaatccaaaaccctaccaacaccacactcaatcgatcgatggggcagcactctctgctctacgcgttcgtgtcgcggggaactgtgattctcgcggagtacacggaattcagcggaaacttcaactccatcgccttccagtg

SEQ ID NO: 14375 - DNA, 273 bp, Glycine max
  Clone ID: 701068683H1
catgtctttgcctgctttattcagggcattaaaaacaagaggtaacactcccaaatatgggttgataattccactcttcttttattggtcgggcatctgccaaaaataagggtagaatggctcgttatcttgcaaacaaatgctcaattgcatcacggattgactgcttttctgaaaagggtactactgtttttgggcagaaactccgtgagcaagttgaggaacgacttgacttttatgacaagggagttgcccctcgcaagaacatagatg

SEQ ID NO: 14376 - DNA, 273 bp, Glycine max
  Clone ID: 701068684H1
agaaagagcaccagcgagtttttacaccatctgtgattgaaccatcatttggaattggacgtataatccaattgcctctttgagcacacattctacacgaggccaagcaaagctggggatgaacagttaaatgtatttcgtttcccttcacttgtagcccctattaagtgtacagttttcccactggttcagaatcagaagtatgaggaggttgccaaactcatttccaagtcattgactgctgttggaatttcacacaagattgacactcac

SEQ ID NO: 14377 - DNA, 270 bp, Glycine max
  Clone ID: 701068686H1
ctcaaggagatggctctgggaagaggcagtgcagtggttctactactttgcttcttgctggttcaatcttaaattggctcctgttgcaacctacacagttggagattctgggggttggacctttaacactgttgcctggcccaaaggaaagctctttcgggctggtgacacacttgctttcaattatagccctgggactcacaatgtggtggccgtgaacaaggctggatatgatagctgcaagactccaagaggagccaaagtgtataa

SEQ ID NO: 14378 - DNA, 273 bp, Glycine max
  Clone ID: 701068687H1
gcatctttctttctcttcctgcagaagctatccgtgttacttgttcccaagtctccaacaagcaaagttacatggttgatttggaaatccaggtccccagcgcattcgacccgtttgccgaggcgagagaatcagatgcccccggggcaaaggagtatgtgcacatacgaattcagcagaggaatggaaagaagagtctgacaacagtgcaagggctgaagaaggagttcagctacgagaagatcctcaaggacctcaagaaggacttctgct

SEQ ID NO: 14379 - DNA, 271 bp, Glycine max
  Clone ID: 701068688H1
gagaaagctaggaagagaaaggaggaaaatattaaagctcttgcaattctcatgaactgtggaatcctggtggggttcctattgttggggttgggagttcttaactgcccttcttctcttctctcatcaaccttattgatcattctcttcttcctcttcttcttcaaaaaccaatttctttttatacaaataaagaagataccaaagaaaaacatagcaaaaaaataaaaataaaaaaatggaaggaacaagcaataaggggttgttggaa

SEQ ID NO: 14380 - DNA, 268 bp, Glycine max
  Clone ID: 701068689H1
gaatttatctgagagctgaagagagggaacgagtttgtgaagtaaagttgactcagtggaaactccggttgacttcgaaatggcgaaacttgaagcgaagctaggaatgatcgtggactcggtggggcagttcttctccggcaaagaccatcttccttattgtgactctgacgtcgtcgctggatgtgaaagagaggtattggaggctgaaaaacaatcatctgaagagcatatgcaggactgtctcctgcgtttatcatgggctctt

SEQ ID NO: 14381 - DNA, 269 bp, Glycine max
  Clone ID: 701068690H1
aaattacaacaccaatctcacccatttcaaaaaaaggccgttagtgttactattcgtaaaatgggcactctggtcctttaccaattctttctcaaactcttgctcctaatttcagtctttcagctttcctttgctgctaggagactcaaccagctggttcaggaccagtcacagttactccattaccacaacggtcctcttctatacggcaaaatcgccgtgaacctaatctggtatggtcacttcaaaccatcccaaaaggccatcat

SEQ ID NO: 14382 - DNA, 267 bp, Glycine max
  Clone ID: 701068691H1
ctcgagccgggaaacaggaatccaatgcccccacctggttacagtcgcaaataaattccatttcactcagggataatccttccctacgaattaaaaattgttgtaccatatctttttctctctcaattagttgaggtttgagagttgtacttgtatttcacctattaagtctagttgagacaatacttgaccaattttccattgaatagatcagtgtcaaattataaccccccttagaactcaggtttgataacatttttatacttg

SEQ ID NO: 14383 - DNA, 267 bp, Glycine max
  Clone ID: 701068692H1
cttcaaactagggttttacagaatataagctctctctatctttggtcctcgtcattcaaatccaatcccattatcaattatgagtcgtcatcccgaggttaagtgggctcagagacttgacaaggtctatatcacggtgcaattggctgattcaaaaaatgccaaggtggatcttacaccagatggtatttttaccttctctggtagtgctggtgctgaagaccatcagtatgagctaaaactggagctctttgacaaggttaatgt

SEQ ID NO: 14384 - DNA, 264 bp, Glycine max
  Clone ID: 701068693H1
caaatttctcagatctatccgacgtcgtcgcagatccaccaaccgttatcggctgcttcagcggtgatgaaaacggttccgttttccggcttccttggagccgcagctgccctcgtcttctgctgtatgggagctgcctatggcacagcaaagagtggtgtgggcgtggcttccatgggtgtgatgagacctgagctggtgatgaagtctattgtccctgttgtcatggctggagttttgggtatttatggccttattattgct

SEQ ID NO: 14385 - DNA, 257 bp, Glycine max
  Clone ID: 701068694H1
ttgatacatctctattggtctctctctcattcccttaatattgaacctctgaagcaacaaattggtttgcctttccttggtcctccttctttcctctttcttagcttctgcccgtctccttgaaccactgaaaggtccaagacaaggtgagaaggaagtggagatcaatgaaaacgcttttcctcaatcatctcatgagctaaaagatgatatggaagaactcatgggatcagaggagtgctatatgaaggatgaag

SEQ ID NO: 14386 - DNA, 268 bp, Glycine max
  Clone ID: 701068695H1
cactctctctatatttgcatcattcatcggaaatggctctcgaggttgctgttaaggctgctgttgggggtccaaattgtcctcggagattgtccattttcccaaagggtcctcttaactttggaggagaagaaaatcccttacaaactccacctcatcgatctcagtaacaaacccgaatggtttttgggtgtgaatcctgaagggaaggtgccagtggttctttttgatggcaaatgggtggctgattctgatgtaattgtgggga

SEQ ID NO: 14387 - DNA, 271 bp, Glycine max
  Clone ID: 701068696H1
gagaaagctaggaagagacaggaggtcaatattaaagctcttgcaattctcatgaactgtggagtcgtgttggggttctcattgttggggttgggagttcttaactgcccttcttctcttctctcatcaaccttattgatcattctcttctgcctcttcttcttcgagaatcaaatttcttggtatacataataaagcagataccaatgatcaacatagcaagatcatatcaatacaataatggaaggaacaagcaataaggggttgttgg

SEQ ID NO: 14388 - DNA, 78 bp, Glycine max
  Clone ID: 701068701H1
ccctcgagccgaatcggctcgaggagctcgagctggcaattaattacagtttaggctgcaaattatggaatcccatga

SEQ ID NO: 14389 - DNA, 169 bp, Glycine max
  Clone ID: 701068702H1
agcagacaccgacacagatctgtcttccgaagcaggaactaaatatggctgacttgttggaatggtcaaagcaagataagaaacgaatgcttcatgtcgtctaccgtgttggtgaccttgatcgcaccatcaaattttacacagaatgtttaggaagaagcttttgagg

SEQ ID NO: 14390 - DNA, 165 bp, Glycine max
  Clone ID: 701068703H1
gttcaaagatgaagatgatccacgttcttttcctctttgctcttgtctcgttcacttcccatgcttctgtcaatgatttctgtgtagcagacctaaaaggtccagatagcccttcaggctatcagtgcaagccacctaacacagtcacagtgatgactttgtgtt

SEQ ID NO: 14391 - DNA, 165 bp, Glycine max
  Clone ID: 701068706H1
cgatgctccaaagaagtcttatgcatcaattgtgaaagtccaaaaagggagttcagttccaactaaagtctatgtgcctactaatacactaaagtctgggcctaacaaaactgagagcaaggtagttgagtcagtagaatctactgaagtgctgaagcagctttg

SEQ ID NO: 14392 - DNA, 165 bp, Glycine max
  Clone ID: 701068707H1
caaagactccataacccaacaatgacgttcaagaggtacgttgagattggaagggttgctcagatcaactatggcaaagagtacgggcggctcgtgatcattgtcgatgtcattgaccagaatagggctcttgttgatgctcccgacatgggaggtcccaagtga

SEQ ID NO: 14393 - DNA, 164 bp, Glycine max
  Clone ID: 701068708H1
gggtaaggtcgcgttgtgttgcgtcgtgtcgtgcgctgttcctctgtctgccgtttttgttttcagaccaaaccctagctccgcatcgcaaccatgtcgaccaagcaaggtggaaaagctaagcctttgaagaaacccaagtctgataagaggattacgacgag

SEQ ID NO: 14394 - DNA, 162 bp, Glycine max
  Clone ID: 701068709H1
cttttaacaggtcccctcgaaacttctgaagatgggtggcattacattcggacgcttggatgattctttcagtctaacctcaatcaaggcctatattgctgagttccattcaaccttgctctttgtttttgccggtgttggttcagccatacctatggtaag

SEQ ID NO: 14395 - DNA, 133 bp, Glycine max
  unsure at all n locations
  Clone ID: 701068710H1
tgatggtagaagtgaagattcaattgtggattattgtggatcgtcgttaatttgaattgtgtgagtgagggaacaaggaaggtgaggaatatntaataaaangaaatggattatgatgtatgtgttaacataa

SEQ ID NO: 14396 - DNA, 155 bp, Glycine max
  Clone ID: 701068713H1
gaaagtactaagtccctccttcctctgccttataattcttgtgaccttttagctggtagcattgaaagtgcaccagcaaacgtgaagccaagccattatgctgcacccttcaataggagtgtttttccttctggttttctatttggaaaggctct

SEQ ID NO: 14397 - DNA, 164 bp, Glycine max
  Clone ID: 701068714H1
ctacagtcagataggactcagttatcaatctccataccaatatcttcctcagacttcatgtcattcactacttcctcaccctccaacgagaaactcacgttgtcgccacttaggctttcgagggcgttaaaccccattcaaatggggttggagtgggaagcggt

SEQ ID NO: 14398 - DNA, 169 bp, Glycine max
  Clone ID: 701068716H1
ctgaaagtgaaggtgaagaaatgcttcttcaaacgaggcaatttggcacagcgtgtccatgggtcagactcacacccgcaagcaaaagaaatagctcagtctcattgagaaggagcaattgtggcccaaaatgttcggtgtcccaattggaattgagagtgagagtgag

SEQ ID NO: 14399 - DNA, 175 bp, Glycine max
  Clone ID: 701068717H1
tcggctcgagcaacttccaagttaggtcactcttccagatggcgcgtacaaagcaaactgctcgcaagtccaccggcggcaaggctccccggaagcagctggcgacgaaggccgctcggaagtctgctccggcgaccggcggagtgaagaagccgcacaggttaggcctggaaca

SEQ ID NO: 14400 - DNA, 71 bp, Glycine max
  Clone ID: 701068718H1
taataggggaaatcccagtaaccttaggaaaatggaagtcacttaaaggtgcttgatctgtcagacaacga

SEQ ID NO: 14401 - DNA, 158 bp, Glycine max
  Clone ID: 701068719H1
cgaacgcggtggcgccgccgttgccaaacaagtgtgattgggaagtcgagccgaccgagcttgacttctccaactcggtgcgaatcgggaaggggtcttttggtgacattttaaaagcccattggcgtggaacaccagttgctgttaaagtattcttc

SEQ ID NO: 14402 - DNA, 163 bp, Glycine max
  Clone ID: 701068721H1
ggctccatcttcttcgatctctcaaactctatcggcgcagaaccaatcctatatcactatggggaagacacatggaatgggagctgcccgcaagctgaagtctcaccgtaggagacaaaggtgggctgacaagtcatacaaaaagtctctcttggaaatgaat

SEQ ID NO: 14403 - DNA, 161 bp, Glycine max
  Clone ID: 701068722H1
ctctctctctacgctttctcgtttgacatccctcaagggatccactaactgaaggagacctggggttgacatttaccaagctttttagccggcttttcgccaagaaggaaatgcgaattctaatggttggtcttgatgccgctggtaaaccaccatcctgt

SEQ ID NO: 14404 - DNA, 163 bp, Glycine max
  Clone ID: 701068724H1
ataagggacaactacaataatccaccagtgtacattaccgaaaatggcgttgcggaatcaaagaatgactcacttgcaatcaatgaagcccgaaaggatggtattcgaattagataccatgatggccatctcaaatccctgcttcatggatcaaagatagagt

SEQ ID NO: 14405 - DNA, 159 bp, Glycine max
  Clone ID: 701068726H1
cactcaatggcttggcactcgttcctcttattagcgacggccattctcgccgttgtgtgctccgccgtgagcggttgctcgccatcggatagggcggcgctgctggccttccggaaggcgctgagcgagccctaccttggcctcttaactcgtggacgg

SEQ ID NO: 14406 - DNA, 153 bp, Glycine max
  Clone ID: 701068728H1
caagacatcattttaaggctaaggttgttttgcttgtctcatgatccttgtgtctggatacctttgcattgatttgtagtgggtgacagctgtttcagcattgaagctactactcctattgtaaacagtgagattcaattttcttcagttaaa

SEQ ID NO: 14407 - DNA, 160 bp, Glycine max
  Clone ID: 701068729H1
cagacattcaacaaacaacgcaatgggtattccgtcggaactgagggacatgttgttgcccaacaaaaagggcgtcctcgttgcctctcccgcagaggacaggaagactttgaggtccaagcaatgcactagggaaggtgtgcgagcggattcaacgctg

SEQ ID NO: 14408 - DNA, 159 bp, Glycine max
  Clone ID: 701068730H1
caaggcaagcgcttctcctctttgtgtcctggctatgcttcttggcaagagttagatcggacgaggattgcgtgtacacggtgtacgttcggacgggttcgatcatcaagggaggcaccgattcagtaattggtctgaagctatacgcaagtccggcta

SEQ ID NO: 14409 - DNA, 165 bp, Glycine max
  Clone ID: 701068731H1
agcagaagaaggcaaagatagtggcagagctccaagctgtgaagcacaacagtggcaagtcctacaatcagttagcggaggagactggactcaccaacgtctatgttgctcagcttctcaggagacaggctcagctcaatccccaaactgccctctacttcgggc

SEQ ID NO: 14410 - DNA, 170 bp, Glycine max
  unsure at all n locations
  Clone ID: 701068732H1
cgaggaaacggtgtttctagggttcgctttcgcagttgagatttgagaattgactttgagaattggaaaaatggccggtttaccagccaggatccgtactcaatccatcgatgtcaaaggtgctgcnctgtggggcgtcagtgccgtcaccggcgcttctacctcgttca

SEQ ID NO: 14411 - DNA, 151 bp, Glycine max
  Clone ID: 701068733H1
aaagagactcaggcgctgctgcccttcagtccttcagcaatggtttacgtgaagtcccagaaatcaaaagcctacttcaagaggtatcaagtcaagttcaagatcagaagagagggaaaaaccgattaccgtgtcaggattcggttggtta

SEQ ID NO: 14412 - DNA, 162 bp, Glycine max
  Clone ID: 701068734H1
acgggatgctgctccaagatttgttaccatcctgcaatagatttctctttttaattcaagaagattttagctctttctaacggtggctggtcgatgaaacaggatggaacaggggattttaaatataaacctgctagaagatttctctgtatccatggcaaa

SEQ ID NO: 14413 - DNA, 159 bp, Glycine max
  Clone ID: 701068735H1
attctaagaaatgaagagccctaccattttcattctctatctactttctgccttctacacctcactcctaccttcagccaccgctcaagtcgtggttgacatggcaggtaatgatcttcaaaatggtgggaaatattatgtgttgccgtaatagagtca

SEQ ID NO: 14414 - DNA, 159 bp, Glycine max
  Clone ID: 701068737H1
gcgaaggactttaggttgggatttgggaattagggttattcgcgtggcgaagatgattgacgtggttttgaacgatcgattggggaagaaggtgcgcgtgaagtgcaacgccgatgataccatcggcgacctgaagaagcttgtgccgctcagactggc

SEQ ID NO: 14415 - DNA, 160 bp, Glycine max
  Clone ID: 701068738H1
cagaacggtgtctccgacgacttccggcgacgaacaggtactatcctcgaactcacctccgattgctgggaataataataatacagtgcaccgtaccacaagttgcaccactgcgcccgagctgctagacgagaatgacaggcttagaaagagaacatgc

SEQ ID NO: 14416 - DNA, 156 bp, Glycine max
  Clone ID: 701068739H1
acgaaaccctcttcatcttgttctatctgtgacgagcatcatggcctcaagagcagtgttattgttggctatgtgtgtgcttccggcgatggttgtcgccattcgcccagcaaagaaccctttttgcgtgaagggtcgtgtctacgtgacccttgc

SEQ ID NO: 14417 - DNA, 159 bp, Glycine max
  Clone ID: 701068740H1
actcgagcgaatcgtgtcgagggctcgagaccaaaaccagaagacgctatcgcaatcgtactccagcgaatatgaaggacgtcgctgcacacttgctcgcagtgttgggagggaatccttccccttctgccgatgacatcaaacactcctcggcgcagt

SEQ ID NO: 14418 - DNA, 148 bp, Glycine max
  Clone ID: 701068742H1
aatcggctcgagacttggccttgatattaaaaaaactgaaaggtgcatggcagacccaaatgctgattctgaaaatcctgtcttgaaagaagagcaagatgcccaagttggtaaggggtcacgaggtgatgttacctattgcctactc

SEQ ID NO: 14419 - DNA, 158 bp, Glycine max
  Clone ID: 701068743H1
ctagcttccaaaccctaacactcctcttcctcttcgatcatcacctctccacaatgccgccgaagttcgacccctcccagatagtcgacgtcttcgtccgcgttaccggcggcgaagtcggcgcggcgagttccctggccccgaaatcggtcccctcg

SEQ ID NO: 14420 - DNA, 159 bp, Glycine max
  Clone ID: 701068745H1
cggtaaggtcgcgttgtgttgcgtcgtgtcgtgcgctgttcctctgtctgtcgtttttgttttcagaccaaaccctagctccgcatcgcaaccatgtcgaccaagcaaggtggaaaagctaagcctttgaagaaacccaagttcgtaagaaggattacg

SEQ ID NO: 14421 - DNA, 160 bp, Glycine max
  Clone ID: 701068746H1
tccacttctgattcagaaactcttaggcattccacattctcaaccccgcaccctaagagcagagcgaaaatgacaaccaccttcgcgaccgtcgcaggactcggtggcgcattactgtcatccacctcatctcgtctcacctcagggttgtgaaatcccc

SEQ ID NO: 14422 - DNA, 160 bp, Glycine max
  Clone ID: 701068747H1
cggctcgagtcgaaatccaagtcgcagttgctaaaccgtaacacaaactgcgatagcgtcgtcccgcaccggggcgttaaccgacgcgtctgtcgttcattcaatcctccccgcagcagaggaatttttggccatggttggtagtcctgcaggactgtct

SEQ ID NO: 14423 - DNA, 162 bp, Glycine max
  Clone ID: 701068748H1
gtcgtagtattatttcatcgattctctcgctgctctttctctctgcgataccagatgatggagacgacggcgaacgataacgctgtcgttgcgccaatcgcggcgttgttgttggtggtgctactcgcggcgagtgtggtggtggaggtcaggagaactcgg

SEQ ID NO: 14424 - DNA, 161 bp, Glycine max
  Clone ID: 701068749H1
cacacccacaagtcatcaaacttcaattgagtttcaaagagatcagtggtagctagtgtggtgcaattgtgttgatcaaggatggaacaaaagaagtttgtggcactattaatggtggttgtggtaatggcttcttctatgtggaaaggtccaaaggtctt

SEQ ID NO: 14425 - DNA, 158 bp, Glycine max
  unsure at all n locations
  Clone ID: 701068750H1
aatttattccctgcacgagcttctttatatagtaggattgtgtcttccttcatcacactatacaagtcccnagaagaccatcactgaactatcaaagcaaccctatgtcgaaggtggtttgtgtcaccggagccagcggcgccatcgatcatgggtgg

SEQ ID NO: 14426 - DNA, 158 bp, Glycine max
  Clone ID: 701068751H1
ggctcgaggaatccctccaagccttggccaatcattctctggcttcagggaggaccaggctcttcaggagttgggtttggaaattctggagaggttggtcctttggatgctaatttgaagccacgaaatttcacatggttgagaaagcagatctcttg

SEQ ID NO: 14427 - DNA, 158 bp, Glycine max
  Clone ID: 701068752H1
gtgcaccgtaagggttgtgaagcaggcagagaagagccatggtgcacgtttctttctaccgaaactatgggaaaacgttcaagaagcttcgtcgtccctacgagaaggagcgtttggacgccgagttgaagctggtcggtgagacgggcttcgctgca

SEQ ID NO: 14428 - DNA, 157 bp, Glycine max
  Clone ID: 701068753H1
cacaggtcaaacattgctggcccagagcaaaatgtacattgcaagtgctagatagatttatttacacatccattgtgcttggacccttgtctcaattggtaagggtaggtttctaaggactgtaattgtttcacttatgttaagctgtagagttttg

SEQ ID NO: 14429 - DNA, 157 bp, Glycine max
  Clone ID: 701068754H1
cagcagagaagcactcatcattcttcgtttgtctaagatccgccttctctgaattgtaaaaatgtcgctcggagaaactgcttgttcatacgcagctctcatccttcatgaagatggaatcagtgtaactgccgacaagatcacaccttgttggaaa

SEQ ID NO: 14430 - DNA, 157 bp, Glycine max
  Clone ID: 701068755H1
ctccctctctcacatcgcaagccagccaccgcctccactggtggcactgtcataatccggcgcgaagttgccccctcaacgtgggagagtgtcgctgaagaagttgtttcgggtacggctaagagatttctgggaatctcatctgaggaatgccagc

SEQ ID NO: 14431 - DNA, 155 bp, Glycine max
  Clone ID: 701068756H1
ctcgtgcgcggtcttcgagtcctctgccggcaggttgaaggtcgtcggaagagcccgcgtcggactcgataatgttggatctggctgccgccatcgagcattgggtgtttggtcgtcaatgcgctcaccgtcaccaccgtcgccgcgttgagcat

SEQ ID NO: 14432 - DNA, 157 bp, Glycine max
  Clone ID: 701068758H1
caaaaggaaaggatgaagcaatcaaaggatccgttcgaagcagcgttcgaggaatcgccgccagaatccccaacggctacggagacagagacagaggaggaggaggacaacatggacgtggagctcgccaagctcccttccacggcgaccctcacaa

SEQ ID NO: 14433 - DNA, 156 bp, Glycine max
  Clone ID: 701068759H1
ctagactcttctttttctctaagtctaaggggtgccctgagatcactttgagcaatggttaaggctgtggcagttcttggcagtagcgagggtgtcactggaactattttcttcactcaggagggaaatggtccaaccaccgaactggatctcttg

SEQ ID NO: 14434 - DNA, 146 bp, Glycine max
  Clone ID: 701068761H1
gcaagctcgctaggttgataatagtttggctttgtagtaagtgaggtgaggtgccaaaatggtgaagataactcttggtactttcgatgactcttttggtgttgcctctcttaaggcttatttggcagagttccatgcaacttgat

SEQ ID NO: 14435 - DNA, 156 bp, Glycine max
  Clone ID: 701068762H1
taggtggaagaagaagagaaaagagagagaagggtaaggtaaccctagagtggtgaatcgaatctgcaaagatggaagctgtttctcgaagaagaggtggaggcattttcgaaagcctctacaaggtcgttatgcgtcgcaacttgtctacgttac

SEQ ID NO: 14436 - DNA, 134 bp, Glycine max
  Clone ID: 701068765H1
gtgatgagatcgaggaggcattgagagcgcagatgggagtgcaaagggaatgacatttgcgagtggaggcgtaagagcacttgcagattcgccagggtgcagagagtagatacatgtcgatgctcgagagagct

SEQ ID NO: 14437 - DNA, 154 bp, Glycine max
  Clone ID: 701068766H1
gcgacataaagatggtgaaagaagttgggttggattcatacagattttccatctcatggtccagaatattccccaagggcaagggagcagttaacaccttgggggtcaagttctacaacgatctcattaatgagattatgcaaatggtaaacat

SEQ ID NO: 14438 - DNA, 148 bp, Glycine max
  Clone ID: 701068768H1
gcggcaacagggagagaagatgaagttcaatccacgtgtgtcgagcagccgccgcaagagccgaacggctcatttcacggcgccatcgagcgtgcggcgggtgcttatgagcgcccctctgtcggcggactgcggtcaagtacaacgt

SEQ ID NO: 14439 - DNA, 145 bp, Glycine max
  unsure at all n locations
  Clone ID: 701068769H1
gggagagagaaagaaaggtgaattggattgcatctctctctgtgtgttggaagaggggaatcgtagatctgatntctttctttctttttaataattttgtgatcagaattattgagctgaacaaaagacaatgggatgtgggaag

SEQ ID NO: 14440 - DNA, 148 bp, Glycine max
  Clone ID: 701068771H1
cctccccacaaggtcacagggactaaagaggtgtaccaccatgtcggacgatgaaagggaggagaaggagttggatctctcttctgcagaagttgtaaccaaatacaaaaccgcggctgagatcgttaacaaggcctgaagctagtta

SEQ ID NO: 14441 - DNA, 150 bp, Glycine max
  Clone ID: 701068772H1
ccttgctgctgctgaaggggcaaggatttctggtgcatcaagaatcattggggttgatttagtttctagcagatttgaagaagctaagaagtttggggtcaatgaatttgtgaacccaaaagaccatgacaagcctgacaagaggtgatt

SEQ ID NO: 14442 - DNA, 145 bp, Glycine max
  unsure at all n locations
  Clone ID: 701068773H1
tcacaatcagntccagtaagcacttaatgtggattttcaaaagctttcttccctctctacattggaagtcttgatcaattctttgacaggtgacctgcctcagactatgagctcattttctagcataagaacctgtatctgcaaa

SEQ ID NO: 14443 - DNA, 79 bp, Glycine max
  Clone ID: 701068774H1
catttttatgtttgccgagttgttgattttcggtgctaagtagatcgtgcttagaccgagtaaatatagccaatacttg

SEQ ID NO: 14444 - DNA, 147 bp, Glycine max
  Clone ID: 701068775H1
gaagatgatgaggaaacattggtagaagaaattggagagagagagagagagagagggttggattggttttcttcttcctcttcctaaagagaatctaatctcaatcctcattacacacatatcgagagcacggatcattcctctctg

SEQ ID NO: 14445 - DNA, 146 bp, Glycine max
  Clone ID: 701068776H1
tcgcactctgtgttttcagcgccgtctccgatctccgacaatggcgacccacatgagcaagaagagaaagttcgtagctgatggagtgttcttcgctgaactgaacgaggttctgacaagagagttggccgagacggttactccgg

SEQ ID NO: 14446 - DNA, 146 bp, Glycine max
  Clone ID: 701068777H1
cataacccgatagaaagacagaaactttaggggtgtgtgtgacattataagtctccattgttccctcttgtaacgttcttggcgtaattaattagtactagtcgttacccttattaatagagtacgtactacctgctagctctgtt

SEQ ID NO: 14447 - DNA, 145 bp, Glycine max
  Clone ID: 701068778H1
cagccatgagcctcttcggtataggtagaaaccagagaacattccgcccgaaaaaaagtactccttctggaagtaagggagctcaacttcgaaaacatattgatgccacgtttggtagtggaaatctgagggagcagtaaagcta

SEQ ID NO: 14448 - DNA, 131 bp, Glycine max
  Clone ID: 701068779H1
ccggtggcgcagttgcgtaatcgggggatggagttggagacttttcaccccgaagtggagacttgtacatagtgaggtcctggagttcaatgcgatggtcatcgcgggtattcataataataagcaggtga

SEQ ID NO: 14449 - DNA, 150 bp, Glycine max
  Clone ID: 701068780H1
tactattatttcatcgagaagacaccttcctccgaattgactgcgacacaagtgtcttgagacgacggtgcatcttcacgctgtcgatgcgccaatcgcggcgttgttgttggtggtgcaacactcggcgagtgtggtgctggaggccag

SEQ ID NO: 14450 - DNA, 148 bp, Glycine max
  Clone ID: 701068781H1
ctcgagccctcgagccgaatcggctcgagactagaaacagtgtgatgaaaatgaaggtccacgttttctaccgttgctacaattttggtagcatggcaatgccatgtgtacgatatgttccctctccgaatgaaactggctatggtgc

SEQ ID NO: 14451 - DNA, 143 bp, Glycine max
  Clone ID: 701068785H1
gtttgttgtgagctataagctagtttatcgtgaggagaatatgaagttgtttgtcttctttgttgctgcagtagtcttggtagcatggccatgccatggcgcaggctaccaaaggttccctctccgaataacactggctatgg

SEQ ID NO: 14452 - DNA, 143 bp, Glycine max
  Clone ID: 701068786H1
cacaaacaaacacccccattttctctcttcctctttctctccgacctagcgagaccgcgcgatccgatcccaaccccgcgatgctccgccgcgcaaccacctcccccatctccggcgcctcccgccgccgctctccaccgacg

SEQ ID NO: 14453 - DNA, 142 bp, Glycine max
  Clone ID: 701068787H1
gcttgggttgctccaatggaggatacccaagaaattgaggagcaaggacatgaagaagtgatttcagacaaaacattcaagaagcagcaggaacctcttgatgaaattctttcacgacacaggaaagagtattgcagctgca

SEQ ID NO: 14454 - DNA, 144 bp, Glycine max
  Clone ID: 701068788H1
ctctatataaattagagaagtactaccaacacactctctaacacacttctcttgacacatattctaccataagttacaaataataaaaaattacaaaatcatgaaaataagatctaggacccatatactttgtgatatctaaaa

SEQ ID NO: 14455 - DNA, 137 bp, Glycine max
  Clone ID: 701068790H1
ggaggagcagttggagtaatctcggcattaatggtggttgagataaacaatgtaaaacagcaggagcagaaaagatgcaaatactgtcttggcactggatatcttgcatgtgctcgctgttcagcacaggagcactt

SEQ ID NO: 14456 - DNA, 138 bp, Glycine max
  Clone ID: 701068791H1
ctcaacgaagaggttaaagagacggcaacactttgctgtccgccttgaccgagcagagcttcgtcttggccctcgattttgccctaaagtactctcagtcacaacagacaccgtcgtcgtcgtctcgtcatcaatggc

SEQ ID NO: 14457 - DNA, 136 bp, Glycine max
  Clone ID: 701068793H1
cttcaaaagggagaagaaaaggaaagacaactctcaaaaaactattatagcaatggcagaacaaaaccaaaaccatacaactgaagctgcaaggcaccaagaggttggtcacaagagccttctcagagtgacgctc

SEQ ID NO: 14458 - DNA, 139 bp, Glycine max
  Clone ID: 701068794H1
gtggtttcagtgagtgatcggtgttcacttgatccttcataagtcgtcatcatcatcatcatcatcaccgttgattgaagaagatgccgatcagaaacatcgccatcggaaggcctgaagaggctatcaccccgacacg

SEQ ID NO: 14459 - DNA, 141 bp, Glycine max
  Clone ID: 701068795H1
aatctctacttctctgtatcaattgtgattgtcttcgtatgcatggttttctacaacatggtgcacaaacttcctgtgatgaagtactataaggaacttaaggttgaggcagtcactgcaaatgaaacaatggtcccctga

SEQ ID NO: 14460 - DNA, 158 bp, Glycine max
  Clone ID: 701068801H1
aagacactctcatagctgtagcggcgacactaagatcggagaaagaatggcgaaaacgacgtcgttgctgctctttacactgatccgcgtcggaaccctagctctcatccaggcgaagaaatcgaaggaggatttgaagaaggtgacccacaaggttt

SEQ ID NO: 14461 - DNA, 165 bp, Glycine max
  Clone ID: 701068804H1
tcaagatttcagttccaaacaacacttatcaaaatctcactatactgattcagttctatacataaccatcgagatttactatcaaaccaaaagattctcaaaatctcttcacctgctgtgatgaccatggactacagacccttagaactcagcatcatatcgcaa

SEQ ID NO: 14462 - DNA, 171 bp, Glycine max
  Clone ID: 701068805H1
gaaaccgcggagagtttgcaactgcatcatcgatcatcgtcacctcatggacggacacgattcacgagacccgaaacagagccctgatgaaatgactggctttgtgcaaaattctctccagcagatgcaaaataggttccagacaatgtccgactccattgtacaaagatt

SEQ ID NO: 14463 - DNA, 190 bp, Glycine max
  Clone ID: 701068806H1
tcggctcgagcttccatctcttgtttcttgctttctttcttcaccatgtcacttgctgggaaaatcaccactgaaatcggggttcatgcaaccgctacaaagtggttcaacctcttcgcaacacaactccatcatgttcaaaacctaactgatagagtgcatggaaccaagctcatcaaggtgaagactg

SEQ ID NO: 14464 - DNA, 138 bp, Glycine max
  Clone ID: 701068807H1
agaggtcgagtttcacagcagcaatggtgtacgtcaagggctcagaaatcgaaaggctacttcaagagctatcaagtcaaagttcaagagctgaagagagggaagagaccggttagcgtgagcggacgtcggttgatt

SEQ ID NO: 14465 - DNA, 169 bp, Glycine max
  Clone ID: 701068808H1
ctagaaacgaagccatttccttcctcaccaacgtcgcccgcactgccttcggcctgggcgcagggccaccgccgtctcctcttccctctacaccgtcgacggcggccagcgcgccgtcctcttcgaccgcttccgcggcatcctggactccaacgtcggcgaaggaccc

SEQ ID NO: 14466 - DNA, 178 bp, Glycine max
  Clone ID: 701068810H1
ctctgcagcaactatgcctaaccctaaggtcttcttcgacatgacgctcggcggtcaatctgctggccgcatcgtgatggagctctacgccgacgtcactccccgcaccgccgagaacttccgcgcgctttgcaccggcgagaagggcgtagggcggagcggcagcccctgcactaca

SEQ ID NO: 14467 - DNA, 176 bp, Glycine max
  Clone ID: 701068811H1
tcgactttgttgtgagctataagctagtttatcgtgaggcgaatatgaagttgtttgtcttctttgttgctgcagtagttttggtagcatggccatgccatggcgcaggctaccaaaggttccctctccgaatgacaactggctatggtagcgttcttcggagtaaaatgcgcaag

SEQ ID NO: 14468 - DNA, 178 bp, Glycine max
  Clone ID: 701068812H1
ctttcatttgagagttgcaggttgccagttaatcgtcttcttctctgcatccatcagatccaaagtttctcgcgatacgagggagcaatgtcagaggctaaggttcaggatttgaagaaggaagaggaggttgctgatgattctcctaagaacgaagttgacatggaaaatctgtgga

SEQ ID NO: 14469 - DNA, 178 bp, Glycine max
  Clone ID: 701068813H1
ccgaagaactagaactagggtttcatctttgccatcagtaaacgacaatgatttacgacgttaactctcctcttttccgatccttcctcagccagaagggaggctcctctgataagaggaaatcggacgaacagaagccaaaagagcagaaacccaaagccaacagaacaaacctata

SEQ ID NO: 14470 - DNA, 186 bp, Glycine max
  Clone ID: 701068814H1
cggctcgatctggcattctcagcgcgtctggcgactagcgaatcttgggcgacacttggatttgagtgaatcagtgaacaaggctgcgccagttgggtcaatcaagttgaaggtagcttcagaggtttctgaagcattatcactgggtcgtgctgttgttgctcttgaatcaccattatttcgcat

SEQ ID NO: 14471 - DNA, 148 bp, Glycine max
  Clone ID: 701068816H1
ctctacactaactaaagccgagcagcgagagagagaaaccctagcaaaaatgccggctggtcacggtttgagatcacgcaccagagattccttctctcgtcccttcaggaagaagggtaccatcgccctcaccacatactcagaacct

SEQ ID NO: 14472 - DNA, 173 bp, Glycine max
  Clone ID: 701068817H1
acacgcctcaccccctacgcgctgccgtcactccagttcaccctgtcagtcagtcacaaaatcgcgccagcccgccgttcaaataacgtcgtcattgtcgaaagatcgtatctcatttccccatttgtttgatttgccatttcatttttagtggattattcagctagctggca

SEQ ID NO: 14473 - DNA, 175 bp, Glycine max
  Clone ID: 701068819H1
ccaagatgtcgaagagaggacgcggtggttcggcggggaacaagttccggatgtcgctgtgtctgccggtggcggcgacgttgaactgcgccgacaatacgggggcgaagaacctctacatcatatcggtgaaagggatcaaagggcgtttgaaccgtccccctcggcttgcgtt

SEQ ID NO: 14474 - DNA, 173 bp, Glycine max
  Clone ID: 701068820H1
aattccaactgataaaaagaatattcagagaattccaaagacagagatgactgcacttaaggaagagcaacaatcaaaccaaatagctggccacaaagaacttggtcacaaaagtctccttcagagcgatgcactctatcagtatatacttgaaaccgtgtgtacccaagaga

SEQ ID NO: 14475 - DNA, 174 bp, Glycine max
  Clone ID: 701068822H1
ctgaactcttccaagtcccttagtatacccctcaaggaaaaatggacggtatgcacttcagtatcctttctctactgctacttctggtggccttctcttacacagaagccagtgcagatgttccaaaaacaacagacaacaaaatagaggtggtggtgaagccacggtctactg

SEQ ID NO: 14476 - DNA, 171 bp, Glycine max
  Clone ID: 701068824H1
cgacaaatgtagatagtgtattttcacgcataattgaaaccacgaggcatcctgcagcggcagcagcatttgcttcaattatgtttgctccccaggcagaattatctttcagcgaagcgggtgtctagatgtcagaaaagcaatgtgccaatttgcctaagtatggaaaag

SEQ ID NO: 14477 - DNA, 167 bp, Glycine max
  Clone ID: 701068825H1
tcttgaatctgctgccacattatacaagacaaaatatcaggctcgtcaaaaaggacaaattgggatcactaatccaacacactactttttgccaaaatctcaaaacgctgcagattacaaggcagcaagtagagctctggacttcttctttggtggtattctgatcc

SEQ ID NO: 14478 - DNA, 166 bp, Glycine max
  Clone ID: 701068826H1
cacacctcaaattctgtgattcgggtaatggccaccagtggaggcgatgaggggcagaacaaccctgacctcgacccggatttggatgctccggatgacccggatcacgagttcgctgagttcgggtcgggttgcttctggggtgctgagttgcctttcagcgagt

SEQ ID NO: 14479 - DNA, 168 bp, Glycine max
  Clone ID: 701068827H1
cgaacaatttagatcagactctaaaacagttaaccaacaagctttcttttatgctagtgaacgcgaagtccatcacaacgacatatatatattcggcatagataacaccgtactctctaatatcccatactatgaaaaacatggatatggggggaggaatttaatgaa

SEQ ID NO: 14480 - DNA, 166 bp, Glycine max
  Clone ID: 701068828H1
acggcttgttcagtctttcttggaactttgttactctcacacatgtctcgctccgtgcctttggtttcaaccatttttctcttgcttctgcttctggtggccactgagatgatgggaccaacaatggtggcagaagcaagaacttgtgagctcagagccaccgttt

SEQ ID NO: 14481 - DNA, 165 bp, Glycine max
  Clone ID: 701068829H1
cgacaagggcttgttgatagtggatcaccaactagccaatgacaagcggacgaagccttatgtgaagaaaatggccacgcgccaggactatttcttcaaggagttttctagagccattactttgctctctgagaacaaccctctcactgttcaaagggtgagatc

SEQ ID NO: 14482 - DNA, 158 bp, Glycine max
  Clone ID: 701068832H1
cgcgtgtcttctccccggtcatgagctcatctgttccgagcgcgaagttaagacgcttcgttgatctcactgctgatgagacttctgatttatggctcactgcacaaaaagttggtaagcagcttgagagctaccataaggcttatcacttactcttg

SEQ ID NO: 14483 - DNA, 172 bp, Glycine max
  Clone ID: 701068833H1
acccaacaactcctcctcgacgttgacgaccacgatgacaagaataagaagcccaagaaaccccacgttcaggcccaaccccaatcccaggcccaggcccaggctcataggtcatccgcatattccgccatggcggtcttcttcctcggcgcctgctccttttgttctactt

SEQ ID NO: 14484 - DNA, 172 bp, Glycine max
  Clone ID: 701068834H1
tgatgtattcaaatgcacgtattatcagatttgttcgtgatgatacctttaattgtcactacctctgaggccatgtcttaccctgaatgtatagtctatgttatatgagtcttgtgtcatatgtcgtaattatcgtttttgttcaaggattgctgtaagctgcttttatatc

SEQ ID NO: 14485 - DNA, 168 bp, Glycine max
  Clone ID: 701068835H1
ccaatgatcaaattgctgcggaccttaaagagcatgttatcaagcctgtcattcctgagaagtaccttgatgagaagcccatcttccaccttaacccttctggccgttttgtcattggtggccctcatggtgatgctggtctcactggaagaaaatcatcattgatac

SEQ ID NO: 14486 - DNA, 166 bp, Glycine max
  Clone ID: 701068837H1
cagggagccatgagtgcacttgcagcatcctccgctactccttccgccgcccaaaccctctccctcttccgctccctcctccgcgccgcgcgccagatctcccgattacaacatcagggagtacaccaaactacgcaccgccgatccgttttgcccaacgccactc

SEQ ID NO: 14487 - DNA, 168 bp, Glycine max
  Clone ID: 701068838H1
ctgatgagtgatggcgaaaggcgtaatcggagaagaaacgcgactcaaattagcggagggtcttctcagccaatccgcagttccatccgaggtgggtcttctaatcggcaagttcagctcctccttgggccgggccttcctcttcgacctcatcccactccacacaac

SEQ ID NO: 14488 - DNA, 169 bp, Glycine max
  Clone ID: 701068839H1
aggtcgctccgcaccagtttcaccgcacgaatatcttgttgtttggagcgatccgagaaaaactctgtaaacatgttggtttaccaggacctccttacaggtgatgagcttctctccgactccttccgttacaaggaaattgagaatggaatctgtgggaagttgaggg

SEQ ID NO: 14489 - DNA, 161 bp, Glycine max
  Clone ID: 701068841H1
ctttgactctcacaaaccttgcatccatccacacatggctggcatgaactctagcgtattggcctgtagctatgccatatctggtgcagcatgctccgagctcaatgggaaggtcacttccgtggcctctgttgcatcctctggcacaagttgccattgat

SEQ ID NO: 14490 - DNA, 128 bp, Glycine max
  Clone ID: 701068843H1
ctttttctctaggcaaatgaatatatttttttcttctaagccgaggctgttcatcagacaggttattccttgaaattttgataggatcagatttatgaactcaaattcaattaaaaaaaagaaaacaa

SEQ ID NO: 14491 - DNA, 137 bp, Glycine max
  Clone ID: 701068845H1
gagagagagtcctgaaacttgggtgcgattccttcactcacaacaacaacacatcactatggctcttctgagtcgagcctcttcacgcttccctcagctggtttcccctcaaagggtagtttcactccacacaacat

SEQ ID NO: 14492 - DNA, 158 bp, Glycine max
  Clone ID: 701068846H1
cgctagagaggctttctagaattatatggaacttgagttggggagtgacacaatggtagaaacagctacgctgaagggagagtttatggagtggagtatttcaaggataacttcgacaggttggttcacataaagaccaaggtgatccccataatttc

SEQ ID NO: 14493 - DNA, 155 bp, Glycine max
  Clone ID: 701068848H1
ccactgcataccttaggtcttccgaattcgaagttaatttgcaagatggctaaggcaaaggctcagatcaacattgtggctggtggtcatgtggaccctgaggcggcaaccaccattaacgagctgaagaagcctgttgtggagcagaagctcca

SEQ ID NO: 14494 - DNA, 152 bp, Glycine max
  Clone ID: 701068849H1
agcgaactgacatggcggcagtagtatcagcatcttctcatctattgtgtgttcttcgttcacaaccattatcagcatcaccgtctttcatttctcttctcaaacctcttcttgtttcttccccctatgctgtatctacaccccttcgcata

SEQ ID NO: 14495 - DNA, 163 bp, Glycine max
  Clone ID: 701068850H1
cgggggcgaagagaagaagatggaggttagtttatcctcaacatcatgtatacccttaagctcgaagttgaagcataagcatggccttttccactctcaaattcccacgcccacagcttcaaccacaaccagaagaacaaaacctttgccatagttaacgccc

SEQ ID NO: 14496 - DNA, 159 bp, Glycine max
  Clone ID: 701068851H1
cacctttgttcactcttcttctcttgcggctagggttttagcgcaggtcttctagatttaaggaagatgggtaaggaaaaggttcacatcagtattgtggtcattggccatgtcgactctgggaaatccactaccactggtcactgatttacaagcttg

SEQ ID NO: 14497 - DNA, 150 bp, Glycine max
  Clone ID: 701068853H1
ggagaaccctaagagatgaagagaactcctatcttgttccctctcttctttcttctttgtgccttcacctcatatctaccttcagccaccgctgatgatgatcatgtgtacgacactgacggcgataacgcttcatacggtgtcaattat

SEQ ID NO: 14498 - DNA, 161 bp, Glycine max
  Clone ID: 701068854H1
gccagacagtgacagtggatgaacacaagagacagacgaagaagaagccgaagaagcagaaaagggttttgtgtgtgtcgcagtggatacttccttccttcaattaatctccgatccgaaaccgtatggggattctatacgcactgtaggtcgcggatcgg

SEQ ID NO: 14499 - DNA, 161 bp, Glycine max
  Clone ID: 701068856H1
cctgctcgtgcctctagggttatcatatctccatttccatttcctctctctcagtttccaagaatctctaagctatgggaaagtcttacccaaccgtgagcgctgattaccagaaggccgttgagaaggcgaagaagaagctcagagcttcatcggtgaga

SEQ ID NO: 14500 - DNA, 159 bp, Glycine max
  Clone ID: 701068858H1
ctgctttctcctggctcagaaacatcttccatgactgtgctgttcagagttgtgatgcttcactgttgctggactccacaagaaggagcttgcctgagaaggaaacagatagaagctttgggttgagaaatttcaggtacattagaccatcaaagaagc

SEQ ID NO: 14501 - DNA, 149 bp, Glycine max
  Clone ID: 701068859H1
cggatagatagagtgatacacatcacattttctcaaagtaatttattaattaataaataaatggcggcggcggcggccgtgacggtgctactcccacctaggattccgaccgctaccaacgttagccgctgctctgctttgcctctctg

SEQ ID NO: 14502 - DNA, 160 bp, Glycine max
  Clone ID: 701068860H1
cccacgacaatgtttgtccaagtccagacgccacacatgattttcacaggtcttgaagattacaaggccagaggaacacaagcagccccttactttactttgaccttttacacagaatttgcagagagcaaggacttggtactgtccgtggggatgttgt

SEQ ID NO: 14503 - DNA, 159 bp, Glycine max
  Clone ID: 701068861H1
ccttgttaggttacctctgtgacatttgtgctgctagttcatatatctgccgctgacaccgagaaggaaagcaggacaaaaacaaaaaggagcagatgggtagctcaggtttctcatggaaattggcggatcatccaaagcctcaaagggtaagactgt

SEQ ID NO: 14504 - DNA, 158 bp, Glycine max
  Clone ID: 701068862H1
cctaaaacagttaaccaacaagctttcttttatgctagtgaacgcgaagtccatcacaacgacatatttatattcggcatagataacaccgtactctctaatatcccatactatgaaaaacatggatatggggtggaggaattaatgaaaccttatat

SEQ ID NO: 14505 - DNA, 145 bp, Glycine max
  Clone ID: 701068863H1
gggtatttggtcactgacctatcttggtagagatttgaagtttaaaccttcaaattaatcaaaccattttaatttgcctatagattctgagtcactgctgctatggcgctacgcgcacttcttgtgttggggatgttgccgatgt

SEQ ID NO: 14506 - DNA, 130 bp, Glycine max
  Clone ID: 701068864H1
cctctattgggcaaatggcaggagtctgaatatggaggtggtcagtctgttcctgttggtggtattgcatactacatcactgcaccttccagcttagctgatatggcagccactcctttccatgcattat

SEQ ID NO: 14507 - DNA, 156 bp, Glycine max
  Clone ID: 701068869H1
gcctcgccgactcggttgctatcagcgagtgagagtgagtgagtggttctcttgcagcaacaaggacttagtgacaccaaacagacgggaaatgggtcgtggggtcagtgctggtcgtggacagagttccttggattatctcttggcagtggggta

SEQ ID NO: 14508 - DNA, 157 bp, Glycine max
  Clone ID: 701068870H1
caacgtcgcagcgagcgagcgagcgatggaagaagaatattttgatttcgagaagaaggtttcgataaaggagacgatgtcgatggaggttgatccagccaaagtccttcttttgcttcgcggtttcctccaaattcagcaagcagggccgaagcat

SEQ ID NO: 14509 - DNA, 158 bp, Glycine max
  Clone ID: 701068871H1
cgtttcttttacaatgaagtaaagcaagcgtctgcatgttctttctttgaaactcgttaaagaatccaaaatatattccgtagacaagatggcgataagatttcttacatggttcctctttgtttcatgtattcaagccattcaagttcagaacagac

SEQ ID NO: 14510 - DNA, 157 bp, Glycine max
  Clone ID: 701068873H1
cggagaagagaagttttgtgcaaaatccttgggaacagtaattggttttgccatttcaaagctgggaaagaacattcaagtactttcaagttcctttgtcaataagcaagaccaatacactgtggaaggagtccagaatctggagacaaagcagtga

SEQ ID NO: 14511 - DNA, 155 bp, Glycine max
  Clone ID: 701068874H1
ccaaaattcagagtgaagacaagcaacgtgatgcagagggagaagatggtaacgatgaaccaggcgacgatgacgacgatggagatggtggatttggggagggtgaagaggagttgtcatctgaagatggaggtggatatgcaacaattccaaca

SEQ ID NO: 14512 - DNA, 156 bp, Glycine max
  unsure at all n locations
  Clone ID: 701068875H1
cgaaggtgtanactgacagcctccaaatccaatggcttcagagaagaaactttcgaacccaatgagggagctaaaagtgcagaagctcgtcctcaatatctctgttggcgagagtcgagatcgtctcaccagagccgccaagtgttggaacaactt

SEQ ID NO: 14513 - DNA, 99 bp, Glycine max
  Clone ID: 701068876H1
cttctctctatcgtcttcttcctctgttccattagggtttcctttactccctcggagcttccaattgaaatccaattgctcaatacctccacacaacat

SEQ ID NO: 14514 - DNA, 153 bp, Glycine max
  Clone ID: 701068877H1
ccaaaagcgaaaccgaaaaccaaatccgaagagtgaaggttcgttgaatcccatggcgagagtgaagcacacgccagcttctcgcaaatccgctaaaaagcaagcgccacgcgcatccacttccacgcagccgccaccatttcccaatcgcct

SEQ ID NO: 14515 - DNA, 103 bp, Glycine max
  Clone ID: 701068878H1
tctcgctctgcactctctctttctcatcctattctcttcgcttctctgttcgtgccacttcttctcgagaactggcatctcatattgttggttatccacacaa

SEQ ID NO: 14516 - DNA, 155 bp, Glycine max
  Clone ID: 701068879H1
acttgtcacccaacttggtgtggtgtatgctattcatcatcatcatctcagatgctgagaaaactcatgaggctgctactgctgctgatgtactttctgtgtttctcatatgttctctctgtctctgctattcctgcaacagaacccaaaatttg

SEQ ID NO: 14517 - DNA, 156 bp, Glycine max
  Clone ID: 701068880H1
cgcagagatggcagttccccgagctgcacactggtcagaaaaatacaacaatgtggtaaagggaacgagcgaaaagggttctgccgtgtttggctattcgcctctgattccaattgatgagatagcaacagcgtttaaacgggagaaggcaatgtg

SEQ ID NO: 14518 - DNA, 155 bp, Glycine max
  Clone ID: 701068881H1
agaattttctagggtttatacaattatcgatggcttcttcagatgttgagtaccgttgctttgtcggtgggctcgcttggggcactgacgaccaagctctcgagagagccttctctcagtacggcgaaatcgttgaaacgagattatcaacgatc

SEQ ID NO: 14519 - DNA, 156 bp, Glycine max
  Clone ID: 701068882H1
cgagtgtttcgttggagtcagaggcgatgatgtcttcaattagattcctatggatcctggtggtgtgtttgacggcatcatgcgcgctaagccaaccgcagaagctatcagcgtacgatgttctcatggagtacggcttccggtgggtcttcttcc

SEQ ID NO: 14520 - DNA, 152 bp, Glycine max
  Clone ID: 701068883H1
ctgagtggttctcttgcagcaacaaggtttagtgacaccaaacagacgggaaatgggtcgtggggtcagtcgtggtggtggacagagttccttggattatctctttggcagtggggtacctgccagcagtgccaatcgtctcgcattcaaaa

SEQ ID NO: 14521 - DNA, 147 bp, Glycine max
  Clone ID: 701068884H1
cgtagaaacacgaaactcagaatccatggcgacaccagcgacgacgaagcgaaaaccggtgttcgtgaaggtggatcagttaaaacctggcaccaacggccacacactgacggtgaaggtggtccgtttcaagccggttgagacggt

SEQ ID NO: 14522 - DNA, 149 bp, Glycine max
  Clone ID: 701068885H1
ctcaaacgtaaaagtggatccaagaaggctacatggcaagcttccactaccttcaccagcatcagaggagaaagcggacccagtaaaagagtttgatgcttataatgattatgcatcttggtcctccgaaactgccatgttgaaatggt

SEQ ID NO: 14523 - DNA, 154 bp, Glycine max
  Clone ID: 701068886H1
cttcgagataactagaaacagtgtgatgaaaatgaaggtccttgtcttcttcgttgctacaattactcgtagcatggcaatgccatgcgtacgatatgttccctctccgaatgaacactggctatggtgcccgtactccgacgtgaaatgcgca

SEQ ID NO: 14524 - DNA, 153 bp, Glycine max
  Clone ID: 701068887H1
ctcaaaactcaagcattgcatccctcttgatttgtagtttgtcttgtcgtttagataaaagttctgccaaatcaagaggggttttaagatcatagtgtgtgtcttgcaacaatggctaagttctttgctgctatgatctggcactctttgcca

SEQ ID NO: 14525 - DNA, 156 bp, Glycine max
  Clone ID: 701068888H1
cagtttttgtctcccctgcaatcaacggcaccccccacaaaaatgacagcggagacagtgaacccaaaagcttaccctttggccgatgcgcaactcgcaataacaatcttggctcttgtgtaagaagctggtaactgcaagaactaggaaagggtg

SEQ ID NO: 14526 - DNA, 86 bp, Glycine max
  Clone ID: 701068889H1
ggcgagcgcaaacgcgcacacactgctacgacagttacacgccggagtcggtaaagaagcggcaaatcgtaacgggcatatttgat

SEQ ID NO: 14527 - DNA, 142 bp, Glycine max
  Clone ID: 701068892H1
cgttcatcaggtgttgtagagagacacatctattgacactgtaatggtgccaaattaagtgcccatttcttcttgtagtggttattagaggatttgctcgctatcatatcacagtatatatcttcttatttgtctattttta

SEQ ID NO: 14528 - DNA, 153 bp, Glycine max
  Clone ID: 701068893H1
cactaactaaagccgagcagcgagagagagaaaccctagcaaaaatgccggctggtcacggtttgagatcccgcaccagagattccttctctcgtcccttcaggaagaagggtaccatcgccctcaccacatacctcgaacctaccacgtcgg

SEQ ID NO: 14529 - DNA, 152 bp, Glycine max
  Clone ID: 701068894H1
cgcaatcccagctcatcctcttctcacagatgacgattatccacaaatacgtggcgcttttaccaatttcaatgtgtgggtcactccatacaataggactgagaagtgggctggtggactctacgttgatcacagcatggagatgatacttt

SEQ ID NO: 14530 - DNA, 145 bp, Glycine max
  Clone ID: 701068895H1
tcgatttttcaccagttcagtgataaactcagaagctaggctagacattttcagctttctaccgggggacgttctggttgcatcgttggatgcattcagtagagtgtgcgatgccggtgaagtaactggaaaacatgtcatgtca

SEQ ID NO: 14531 - DNA, 277 bp, Glycine max
  Clone ID: 701068901H1
ctttgaatatctgttcattaagaagattctttcagccagagacatagggactgggtgcatgttatttgcttctctgctggatgatatcggcatagatttacctaaagcaccaaataattttggtgagataatagggaaactagttttggctgggggtttggattttaaggtggtgacagacatccttaagaacgtggaggatgaccggttccagaaagcactatttcttctgcgctggaggtaattactctgcatctgggcaaactgtgctggatgc

SEQ ID NO: 14532 - DNA, 305 bp, Glycine max
  unsure at all n locations
  Clone ID: 701068902H1
gcgtttttggatcggaacctcttctgcggcgtangcaatgggacactccaacgtttggaactctcacccaaaaaactacggtcctggttctggcacttgccgtgtgtgtgggaatccacatggactgatcaggaagtatggccttatgtgctggcggcagtgcttccgtagcaatgccaaggaaattggcttcatcaagtatcgctaaaagagcagttgtcaactacggaccaatattgtgttctggcactaggatgttttgaggatgttatgtttgaagacacttgagactttctttttcatct

SEQ ID NO: 14533 - DNA, 307 bp, Glycine max
  unsure at all n locations
  Clone ID: 701068903H1
attcacaaccgaaacagtttccatctctctcacaaaatgacaacaatatcaaattgctcccttctcttcctcttcctcttcctctccaccctccacatagcttccaccctctcaacccccaccaacttcatcaagtcctcctgcagcaccacccagtacccagccctctgcatccagtccctctccgtctacgcctccaccatccagcaagacccccacgagctcgtccagacagccctctccctctccctcaaccacaccgagggccaccaaaccttcgtcgncaaatgcaacaattcagaggctc

SEQ ID NO: 14534 - DNA, 311 bp, Glycine max
  Clone ID: 701068904H1
ctcgagtccaaactctcctcctacccaaaatggatgcaagggcatcatcttcttcagcttcctcgattcttttccttgcagcaattgtagctgcttatttctattcatcagaagcagctgtgtccaaaggatcttttgaggacaatttcagcataatgtggtctgaggaccattttactacctctaaagatggacagatctggtatctctcactagacagcgacacaggatgtggatttcaaacaaaacaacgctaccgatttcggtggttcagtatgaagctgaagttggtagcacgtgactctgctggt

SEQ ID NO: 14535 - DNA, 312 bp, Glycine max
  Clone ID: 701068905H1
agaaattcacttcagaaagtgataattaacaagatgctggagctaccaaaagttgcctcgtaaagtaggtcttactcagaagccaacaacaataagtaatggcatcagcagaagggaaggctccttatacagctaattgttttactcaagatttccggattcccctgagttctctggatcatccgtcatcagtttcaaaaaaattagtatctgattgggttcctaataattctattaatgatcaaattctttctaattcagtttttgtaacccataatctgaattctgcatagctaccagaaatgaaatggt

SEQ ID NO: 14536 - DNA, 312 bp, Glycine max
  Clone ID: 701068906H1
caaccaacctcactctctctttctctctgttttctggtaattcatcaattgattcaaaatgcagaggctcaaactgcaactagtgctattcctctcaatctcaacttctcacactgttttctccttcactgatgggttgttgccaaatgggaacttcgagcagggcccaaagccatcacaattgaaggggtccgtagtgacaggccacgatgccataccgaattggacaatttcggggttcgttgaatacataaaatcaggacaaaaacagggtgacatgttactggttgtgcccgacggtgactatgcagt

SEQ ID NO: 14537 - DNA, 291 bp, Glycine max
  Clone ID: 701068907H1
cagaaatttaagtgaggagctagagaatgatgatgaagtctgctatgtgtgcagtggtggttgtagcacttcttcttctggcggcggtggggcccatggctgaggctgtgacatgcaccccaacagagttgagtccgtgtcttccagcaatcacttccggtgctaaaccttccaatgcttgttgcacgaagctgaagcagcaaaaaccatgcttatgtggctacctcaaaaacgctagcttgaagcagtatgttcactctcctaatgcacgacaaaccgttgcttcttgtg

SEQ ID NO: 14538 - DNA, 188 bp, Glycine max
  Clone ID: 701068908H1
ccgactccttttggttgctacagagacagggagacaagacagagtagtacagattactaccaatggctaccaaggtttacattgtttattattctacgtatggacatgttgagaagctagctagagagatagaaaaaggggctgcttctgtggagggagtagaagcaaaactgtggcaggtacctgaa

SEQ ID NO: 14539 - DNA, 309 bp, Glycine max
  Clone ID: 701068909H1
ccacaagccaagtgaaagagagaagaaaagtcaaagacaatgtcagggatcattcacaagattgaggagacccttcatgtgggaggccacaagaaggaggaggagcacaagggtgagcagcaccatggtggagaatacaaaggggagcatcatggtgaacacagtactgaatacaaaggagagcatcatgttggtgagcacaagccggagcaccatggaggagacgagcacaaagaggggttcctagacaagatcaaggacaagatccacggcgaagagggtggcgccccgccgagggcgagaagaaga

SEQ ID NO: 14540 - DNA, 302 bp, Glycine max
  Clone ID: 701068910H1
aaattacaatcaggatgcctatagacttcagttgaaactgttcctttatgaagcaaagcaacaacagttgctatcaggtgtccggaccttcttgaaagtgtattcaacaatctccctcacaaaacttgcaagttacatggaagtggatgaacccaccttaaggactatcttgatgacatacaagcacaagacacatgctgttgatagtgatgggaaaattacatccaatgccgatttagatttctatattaatgatgacacaattcatgttatggagtctaagcctgccaaacgttatgggg

SEQ ID NO: 14541 - DNA, 310 bp, Glycine max
  Clone ID: 701068912H1
ctgctgcataggaagaaaccctagcctctcaccctccctgcgacacgatgcagatcttcgtgaaacccctaacgggtaagacgatcacccttgaggtggagtcttctgacaccatcgacaacgtgaaggccaagatccaggacaaggaaggcatccctccggaccagcagcgcctcatcttcgccggaaagcagctggaggacggccgcaccctcgccgactacaacatccagaaggagtccaacctccacctcgtcctccgtctacgcggtggcgccaagaagcgcaagaagaagaactacaccaagcc

SEQ ID NO: 14542 - DNA, 182 bp, Glycine max
  Clone ID: 701068913H1
caagatttctattatgctaattccaaattcatctttataaacactcaagcattggccattgagcttcgcgataactatggttttccggttccggaaactccttgctgcctaacgggattaacaagggaatgtggtcctgatccagaagcggggtataattaggattgctaaggggtttttga

SEQ ID NO: 14543 - DNA, 305 bp, Glycine max
  unsure at all n locations
  Clone ID: 701068914H1
gcattattctcttcccttttctatctccctctgcaaaaacgngtcaatgggtcggcttaatctcctacttgtgtggtcactctctttaacacttttccttaattatctacacccaacctctgcccagctcagtccaaaccactatgctaacatatgccccaaccttgaaagcatcgttagacaagccgttactaataagttccaacaaacctttgtcaccgtcccagccacccttcgcctattctttcacgattgctcttgtccaggttgtgatgcttccgttttgattgcatctacggaaataa

SEQ ID NO: 14544 - DNA, 306 bp, Glycine max
  Clone ID: 701068917H1
tctgggtcgacggaagtattgcatgtttttggtaagcaaaagccagactataatgggctaagtcaccttaaaattgtgaccatgattttatacgaggttctcaggttatacccacctttaatttattttgctcgagcgatcaagaatgatgtgaaacttggaaacctttccctacctgcgggagtgcaagtttccttaccaatactattgattcaccaggatcgtgatatttggggtgatgatgctacagagttcaaaccagaaagatttgctgaaagagtagcaaggcaacaaagggccaggtgt

SEQ ID NO: 14545 - DNA, 274 bp, Glycine max
  Clone ID: 701068918H1
atcaaagccatggccacctccaacttctctattgttctctccgtctccctagccttctttttggtgctacttaccaaggcacactcgaccgataccgtttctttcagcttcaacaagttcaacacagtccaaccaaacattatgccccaaaaagatgctagtatttcatctctggggtgtacaatcacatagttgcagcacgggtgccactaggattctcggtctgcttacgctgccatcagattggcacgaactgcagtgcagtggtaatctt

SEQ ID NO: 14546 - DNA, 311 bp, Glycine max
  unsure at all n locations
  Clone ID: 701068919H1
gcataatctagggtttgttcgttggttcgcaacaatggcgatgaggagattctacaacgagatcaaggggaagagggtgagcgaggttccggagcacgtgaagccgatgctgtcgctgaactacatcaagaaggcgattcagagaggcttcgataattaccatgccaagtacattgaaaccagctcccccgatcccatcttccatgtctgctacggcggcatgatcttctcctacctcgttgctctccccacgagcgccgccacctccagcacgnccagcagcaccactgatccatcccctcagctggatc

SEQ ID NO: 14547 - DNA, 300 bp, Glycine max
  Clone ID: 701068920H1
gttcataccctgcttcagatacaatgcgttgatcagaagggcttgtgttatgacattatgaggatttctaaagactctgatattaaggttgcttttggtcgattttcttcaagtgtgaaaggctttcggaatatagacttgtttgtccagcacaacgatgggaaaaagatcatagatcctgaaagccagaaaaccttgtgttcatgcttaaaagaagagatgcttcatccgttgcgggtgacgatagtgaaccggggtccagacacagaacttctggttgctaatcctgtggagctgagt

SEQ ID NO: 14548 - DNA, 284 bp, Glycine max
  Clone ID: 701068921H1
tcgaaacgacaaagaatcccctctagcaatatggctggtgaagtttactaggttctactcatcttgtgctattcattctttgtttgtttcccatatttggttttgctctgcacatagctcaaagaggataagcaaaaggggtgtagaggattgatggtgggattgatggaagagttatcccgaaatgaagagaaaggcaaaaagggtgttaagctgtggggtaatatacatgtggtctgttctttctcaagggtgacacttgacactagctttgcagacagttt

SEQ ID NO: 14549 - DNA, 271 bp, Glycine max
  Clone ID: 701068923H1
ggcacttggaatccaaaaatgagagaaatcatcagcattcacataggtcaggccgggatccaggttggcaactcctgctgggaactctactgcctggaacatggcatccagcccgatggcatgatgccaagtgactcctccttcggtgtcgaccacgacgccttcaacaccttcctcagcgtgcacggatcacgcaagcacgtccctcgagccgtcttcgacgatctcgagcccaccgtcatcgcagaactccgttgtggcacttaacgtc

SEQ ID NO: 14550 - DNA, 305 bp, Glycine max
  unsure at all n locations
  Clone ID: 701068925H1
tgttcncactccctttctctctccccaacccaaaaatggcatcaaaattgaccctcattgcgttggttctcgcggtggccctgtgcgccgttgatctaacccatagcgcatcagcatcctcccctcacgcgccagccncctccgtggactgcaccaacctcgtcctcaccatggccgactgcttgttcttcgtcaccaacggtagcaccgtcaccaagccagagggcacatgctgctccggtttgaactctgttctcaaaactgctccggcgtgcctctgcgaggctttcaagagcagcgctcag

SEQ ID NO: 14551 - DNA, 308 bp, Glycine max
  Clone ID: 701068926H1
cggctcgaggaaaaaaaaaaacagcgccctagatttgctcttctttgcttcggaacaaagagaacaacaaataacaatggcgttcgcttctttcctcggcagagttctcttcgcttccgtcttcatactctctgcttaccaagaatttaacgactttggagttgatgggggacctgcagcaaaagcactcagacctaagtttgatgcctttacacatcgagtgcattctcaagttggctttcaacttcctgagattgatctgaaatttttaattgctggggctattgctctgaagggccttggagggg

SEQ ID NO: 14552 - DNA, 269 bp, Glycine max
  Clone ID: 701068927H1
cactagctctaggcctcaattagttattatattaatttggtctaagtagttgttattacttgtgtagtagttcttctccaatggctgatttaggttcagactcttccacgagaatgtggtgattcgttccagaaagaatgcagcttcacttggccatgttggccttgcagtttggctatgctggattccatgttgtctcaagagccgccattaacatgggcgttacaagcttgtttcccagtctatcggaacatcattgccttgcttct

SEQ ID NO: 14553 - DNA, 296 bp, Glycine max
  Clone ID: 701068929H1
attgagagacaaaatggccaaatcaatcaaattctttgagttgaacacaggggccaagattccatctcttgggttagggacttggcaagctgaacctggtgttgtagctgaagctctcaccacagccattcaggttggatacaggcatattgactgtgctagtgcgtataagaatcaagcagagattggttctgctcttaagaagctttttgatgatggtgtggtgaagcgtgaggacttatggatcacttccaaactctggtgttcagatcatgcaccagaagatgtgcccaaag

SEQ ID NO: 14554 - DNA, 272 bp, Glycine max
  Clone ID: 701068930H1
cttggtttatgggaagagagcaaggcaggaagtcagtgtttataaaacgacagtaggagcctggtctggtcggtgtggcactcaaacattgtttgttgtaggaagaggaatcttgagacatggcaggggacagcaagagcaagattctgttcatcggagggactggttacatcggaaaattcatcgtggaagccagcgccaaagctggccacccaactttccttttggtgagggagtccactctctccaaccccgcaaatcaccctcatcga

SEQ ID NO: 14555 - DNA, 180 bp, Glycine max
  unsure at all n locations
  Clone ID: 701068932H1
gaaagaaaaccctagcttaccttttcaactttcaagatgcaaatctttgttaagacactcactggtaagacaataancttgtggtggagagttagatacatagataatgtaagtcaagatcatgcaggagggatcacagacagacgtctatttgtggagcactgagatgagtaatgtgat

SEQ ID NO: 14556 - DNA, 258 bp, Glycine max
  Clone ID: 701068933H1
caaggactgaacgaaaaaaccttagggttcctctgttcttcttcgccccccaaaaaattttctggctcagagaaattcaaccgttctcgccattgccgaagctccaactcctcgcatttccaactcttcacccaaaaccctttttgttggaacagagtttcagagagagacccttcacaacatggccaaaacgaggccaggcagaaaagacttggattcctacaacatcagaggcaccaacagatcgtaagagctcgg

SEQ ID NO: 14557 - DNA, 308 bp, Glycine max
  Clone ID: 701068934H1
cggttttagggcacacaccgcagctttaagctcagggaaacgttttatttcacactctgcgattcgcgatggccgacgatgactatgaggatatcgacatggggtacgaggatgagccaccagagcccgagattgaggaaggtgcagaggaagatttggagaacaaaaacgatgagttaactggagagcctattgacactgaggataaggaagaggaccaaccagtggagcggcctcgaaagacatcgaaatatatgactaagtatgagcgtgctaggactttacgtacccgtgctcttcaaatcagt

SEQ ID NO: 14558 - DNA, 246 bp, Glycine max
  Clone ID: 701068935H1
cggctcgagtaatcctgaggcactgaaagtgtgatatggcaagactcatttcctcttcctgcgaccgcctcgcaatgcgcctcttctccaccaccaccacagccaccgcgttccccgtcactttacccaaaccctcatcactctccctctcatcgcgtcgattcctcttccctctctcccatgccatcgctcctccctccacccgctccgccggactccggtgccgcgttaaccgcgccggagact

SEQ ID NO: 14559 - DNA, 283 bp, Glycine max
  Clone ID: 701068936H1
aacttcccgatctctctctgtctctatatctgtatttctgaattttgggaatagaaaaaccctaagcaaagcaaagcggtaacgatggggaacacggagaagctgatgaaccagatcatggaattgaaattcacttcgaaatcgctgcagcgtcaatcgcgtaagtgcgagaaggaggagaaatcggagaagctgaaggtgaagaaggagatcgagaaaggcaacatggacggcgctcgaatctacgcggagaacgcgatccgtaagcgcacggagcagatga

SEQ ID NO: 14560 - DNA, 270 bp, Glycine max
  Clone ID: 701068937H1
gtgaggttgttgctgttactggtgatggaactaatgatgatcctgcactgtgcgaggcagacattggacttgcaatgggcatagcaggaactgaggttgccaaagaaaatgccgatgtcattataatggatgataacttcacgactattgtcaatgttgtcaaatggggacgtgcagtatacataaacattcaaaaattcgtgcagtctcaattgacagttaatgttgttgctctggttatcaacttcttatctgcgtgcatcactcgat

SEQ ID NO: 14561 - DNA, 278 bp, Glycine max
  Clone ID: 701068939H1
cggcgttcagtgttcaccacagtttacacacgagtacccattttctcttctcaatttctcagagtgtgcagagaaaatcatggtggacgcagcagaacgtaggtacttggaggatgacgattcatcactcatgaaaactattaagggggcaacaactggtttagttgctggcactcatctgggggaccgtagttgccacctggtatgatgtccctcgtgtagagagaaatgttgctcttccagggctgattaggactttcaagatgatgggcaactat

SEQ ID NO: 14562 - DNA, 297 bp, Glycine max
  Clone ID: 701068941H1
ctctttgcaacacaacattataagacaacacagagagaagcgtcttaataaacgctcttctctgaaaaacctgatttcttctcttcttctcttctctttcgtatcgatcttcgatctctgaaaatgagagagtgcatttcaatccacatcggtcaggccggtattcaggtcggaaacgcctgctgggagctctactgcctcgaacacggcattcagcctgatgggcagatgccaagtgataagactgttggtggaggtgatgatgctttcacaccttcttcactgaactggggctgg

SEQ ID NO: 14563 - DNA, 300 bp, Glycine max
  Clone ID: 701068942H1
tgcagatggctaatccacacattgcactgctcaaactcacctccatcttcattgtcattgcctcagcacctgagctgtgtggaagcagtaagactttcactctagtaaattactgcaaggagacaatatggcccggaataacgcgcagtgacaaccacagtggcgatggcttcgcattgaaatctgggcactcaactgtatatactgctcctgatggatggagtgggaggatatgggctagaacaggctgcaactttgacaacaatggccatggcaagtgccaaactggtggctgtggca

SEQ ID NO: 14564 - DNA, 304 bp, Glycine max
  Clone ID: 701068947H1
catcaacagagaaacatttcactaatagagagacataagcataatattgagaaatcctggagggttgtacttattgtgtgaagttgctatgccttgttgggtttgtggtgcttgtgagtactattgcaggggtggagagtgctggtgaatgtgggaaatctaccaccccagataatgaggcttataagcttgcaccatgtgcctcagcagcacaagatgagaatgctagtgtttctcagagttgctgtgctcaggtgaagaaatttggcagaacccagcctgctctgtgcagttctgctctcca

SEQ ID NO: 14565 - DNA, 270 bp, Glycine max
  Clone ID: 701068948H1
agtggttgcgcctctgcctgtaagagtgaaaaaaccttctcttttccttctctcaagtctcaagagatttcatcatggctccaaagaaggacaaggctccaccaccttcctccaagcccgccaaatctggcggtggcaagcagaagaagaagaagtggagcaagggaaagcaaaaggagaaggtgaataacatggtgctgtttgatcagggcacctatgataagctcctttctgaagctcccaattcaagctcatcactcctccaatctt

SEQ ID NO: 14566 - DNA, 314 bp, Glycine max
  Clone ID: 701068949H1
ctcttcttcgtctcaagtctcttcgttccttcgattcgttccatttcttccaaaatggccaaagacccagttcgcgttctcgtcaccagagctgcagggcaaattgggtatgctcttgtccctatgattgctaggggagtgatgttggtccctgaccagcccgtgatcctccacatgcttgacattcctccggcagcagagtcattgaatgggggtataatggaattggtggatgctgcattccctcttcttaaaggtgatgttgccacaactgatgtgggtgacgcatgcactggggtcaatattgccgtgat

SEQ ID NO: 14567 - DNA, 308 bp, Glycine max
  Clone ID: 701068950H1
ccaacttgtaagaatagttattattatctgaagttgtgatttcaatttctgatactgtgaagagtgaaaaaatgccgcaagacttggcattggatttggaggagcttcgccacctccacagcatcgtcaaaagacctcgacctctctctctactctcctccgaaattcgcatcctcgaaaagttatcgtcatcagaggagccttctgcgcaggcttcgccgattccggcgccgattaagcacggaactaaggtggcgccttcagttgcactgaattatgtcgcactcgcttcgttcagttgggatcag

SEQ ID NO: 14568 - DNA, 289 bp, Glycine max
  Clone ID: 701068951H1
caatagctttcctcggttataaccttcaaggtggaaagaaaaacccacccactatcccaattccaataaataccttcctctctatattttcgcacaataccctctcacccttcaacgatgagttactacaatcagcagcaaccacccgtcggtgttcctcctccccaaggttacccaccgccggattcttacggaaaggacgcgtaccctccgccagggtacccgacgcatagacggatacctccgcacgcgtattcagcacaggggtaacctccacctacgcggctct

SEQ ID NO: 14569 - DNA, 280 bp, Glycine max
  Clone ID: 701068952H1
ctcgaaaattctcagtttgcagagaaaatctgaatcatgtcgtggcaagcgtatgtcgacgatcaccttctgtgtgacatcgaaggtaaccacctcactcacgctgctatcatcggccaagacggcagcgtttgggctcagagtaccgacttccctcagttcaaacctgaggagataactgccatcatgaatgactttaatgagcctcgatcacttgctccaactggattgtatctcggtggcaccaaatatatggtcatccagggtgaacccggtgctg

SEQ ID NO: 14570 - DNA, 309 bp, Glycine max
  Clone ID: 701068953H1
cacgcactgagttagagtgagagacactagtgactgacttttcgagaaaggaaaaaaaaagagtttccggcattattccatcatgaacgctcttcccattcttctcttcttcctcttcgtttcggcattagtttatgcgaagaaaactggcgatgtgacggagttgcaaattggcgtgaagcataaaccagcatcatgtgaagttctggcacacaaaggtgacagagtcaaagtacactatcggggaaaactcactgatggaactgttttcgattctagctttgacagacataatccaattgactttga

SEQ ID NO: 14571 - DNA, 183 bp, Glycine max
  Clone ID: 701068954H1
cataccttagcatgacattcaacttcatgggactacatgttgaagtttgattggtgaacgaggtgcgctaatgccttcttaagttttgcttttctgtcactttccctctgtgttggtttgctctgatcacttttgtctgcattacaacctgtgcctcagatctgatctcttgatccacaaaac

SEQ ID NO: 14572 - DNA, 308 bp, Glycine max
  Clone ID: 701068956H1
acgcaactgaataggataaccctaagagatgaagagaactcctatcttgttccctctcttctatcttctttgtgccttcacctcatatctaccttcagacaccgctgatgatgatcatgtgtacgacactgacggcgataagcttcaatacggtgtcaattatttcgtgttgccagtgataagaggaaatggcggtggaatacaagtagcaaaagcaggaaacgaaacttgccctctgactgtggtgcaatctggcaacgagctctctcaggggttaccgataaagattgcatctcgatcagcaggag

SEQ ID NO: 14573 - DNA, 299 bp, Glycine max
  Clone ID: 701068957H1
acaaagcacaaagcaaagctcatccttgagttaaaaaatggcagcagcttcttccatggctctctcatccccatccttggctggcaaggccgtgaagctgggcccatcagccccagaagtgggaagggtgagcatgaggaagaccgtcaccaagcaggtctcctcaggaagcccatggtacggcccagaccgagtcaagtacttgggcccattctctggcgagcccccgtcctacctaaccggtgagttcccaggcgactacggctgggacactgctgggctttccgcagacccagaaa

SEQ ID NO: 14574 - DNA, 300 bp, Glycine max
  Clone ID: 701068959H1
cgacaagagaattagggtcacgagggtttcatcctgcggcatcagacatgggaggaggcaatgggcaaaaggcaaagatggctcgcgagaagaacatcgagaagcagaaggccgcctcaaagggaagccagctggattcaaacaagaaagcaatgtcgatccagtgcaaggtgtgcatgcaaacatttatgtgcaccacatcggaagtgaagtgtagggagcatgctgaagccaaacaccctaaatctgatgtttatgcttgtcttcctcatctcaaaaagtgaacatattggagagtgc

SEQ ID NO: 14575 - DNA, 269 bp, Glycine max
  Clone ID: 701068963H1
gtttccacactgcataccttacgtcttccgaattcgaagttaatttgcaagatggccaaggaaaaggctcagatcaacattgtcgtggttggtcatgtggaccctgaggaggcaaccaccattaacgagctgaagaagcctgttgtggagaaagaagctccagggcatgccatatgagggcatgcacgtacggcctcggaggggaaccagaaaattatgttaacaaaataatctggaaccccaatgtatcagtgtcctcctcagtgtgt

SEQ ID NO: 14576 - DNA, 264 bp, Glycine max
  unsure at all n locations
  Clone ID: 701068964H1
tcgtcattcggctcgaggcttgtgttagtgaggttagaagataaagaaagaatggcatttgcaggaacaacccagaagtgtatggcctgcgacaaaacggtttatctggttgataagttgaccgcggataaccgagtgttccacaaagcttgcttcatccgncatcactgcaaaggaaccctcaaggtctctctccctcttttacaattcttgttgattatatagtctctatctagttcaggcttctagctttggatctggtgt

SEQ ID NO: 14577 - DNA, 270 bp, Glycine max
  Clone ID: 701068965H1
ctcacactcattccgtgctctaaatctcaaattctagggttagggttcccaatttctccgccaatcagaagatgagttccaccggtggttctaccaagggcggaaggggcaagcccaaagcctccaaatccgtttcaagatcgcagaaagctggtctccaattccccgttggaagaatcgctcgattccttaaggctgggaaatacgctgagcgtgttggtgctggtgctcctgtgtaaccctctgcagtgttcgagtatctcgctgctg

SEQ ID NO: 14578 - DNA, 262 bp, Glycine max
  Clone ID: 701068966H1
attcttcgttattgtgttcccttctccaatgatgccggaaagtgacatcactctatcctctttcaggcttcgttgggacgtgttcctgagcttcaggggcaccgacacgcgggacactttcaccatgagcctctaccacgctctccaccgccgcggcctccgcgtcttacgcgacgacgacgggctggagcgcggcgacgagatccagaagaagcttctggaagccattgaagactccggcgccgacgtcgtcgttctctct

SEQ ID NO: 14579 - DNA, 271 bp, Glycine max
  Clone ID: 701068969H1
gcgcctcttgatagggtctcccaccctaaccaagccagatcccgttttcaattccttctcagtttccttttctctgaaaaaacatgttgagggttgcagctagaaggctctcttcttctctctcatcttcttctccgttgcggcccaatcacgccgcttccgcttttctctctcgaaacgacgtcgtcgtcgatgaccgcagatctgctcctgcctcccatccccttcttcccttcagaggttatgctactgaatccctgatccacacatc

SEQ ID NO: 14580 - DNA, 301 bp, Glycine max
  Clone ID: 701068971H1
tgtgactaagcccatcaaccttagcacattaaaggtcaacattaacaaacaaaagaaagaagcatttgaaatactacagcctgtattggatgtcgatcctgaatctaatcctcattttgatgcaagcatgggtatcaacaaaacaaagctcctgcggcccaagaggatgaatttccaatttgtggaggaaggaaaatggtcaaaagatgctgaaacaataaaattgaagagtaaatttggagaagctcaagcaaaagagcacaaggccaaacaagcacagttggcaaatgcaaaggctgct

SEQ ID NO: 14581 - DNA, 149 bp, Glycine max
  Clone ID: 701068972H1
tctcagtgtacccaaaaacagaggcagaaggaggaagaagtagaagaagattagagagagtgagtgagtgagcgagggataattggcgagtgagggtttcgaattgactcactgagtctttgcattgtgtcgccggttttttttttcgc

SEQ ID NO: 14582 - DNA, 300 bp, Glycine max
  Clone ID: 701068973H1
cactgcgctaaccccttctctctctctctctctgctcggttctccgatcgccgtcttcgccttgcccattcctgatcaatatgtctagaagatatgatagccgtacaacaatcttctcccccgaaggacgtctttaccaagtggagtatgcaatggaggccattgggaatgctggaactgcaatagggatcttgtcaaaagatggggtagttctggttggtgaaaagacggtcacatccaagctgctgcaaacctcaacctccactgagaaaatgtacaagattgatgatcatgttgcat

SEQ ID NO: 14583 - DNA, 297 bp, Glycine max
  Clone ID: 701068974H1
cctggaactaccaagcctgatgagggggaccgccacccatactctataatagagtgtgagcctaagcgtgaagtcattttaccatctgtaatctacatacaaaagattttgcggcgaaggccatttctcatcaagaaccttgaaaatgttatgcggaaattccttcagtccttggaacttttcgaggaaaatgagaggaaaaagttggcaatcttcacagcacttgctttctctcagaagctgtctggtctcccaccagaaactgtgttccaacacttcttaaagataacttgtggc

SEQ ID NO: 14584 - DNA, 215 bp, Glycine max
  Clone ID: 701068975H1
atcgagataactagaaacagtgtgatgacaatgaaggtccttgttttcttcgttgctacaattttcgtagcatggcaatgccatgcgtacgatatgttccctctccgaatgaacactggctatggtgcccgtactccggaggtgaaatgcgcaagttggaggcttgctgtggaagcacacaacatctttggcttcatcacccttcctgaagagtg

SEQ ID NO: 14585 - DNA, 301 bp, Glycine max
  Clone ID: 701068978H1
gttaaccatgaagtttatgtatcttgcattcctacttctatttgtcttctctagccaattcttccttggaggagcagatgcttcccccagacaagtgattgacacagaaggcaagaaagttcgagctggcgtagattactatatccgaccggtcccaacaaccccatgtgatgggcgtgggccgtgtgtggttggaagtggctatgttctcatagcaaggtcatccaaccacacttgccctcttagtgttgccgtggtggagggtttccgtggcctagcagtcacattcaaactagttaac

SEQ ID NO: 14586 - DNA, 227 bp, Glycine max
  Clone ID: 701068980H1
catggatctaatagcaggtgggactgagagttcagcagtaacagtggaatgggcaatcacagagctattgagaaggccagagattttcaagaaggcaacagaggagctagacagggtaataggtagagaaagatgggttgaagagaaggacattgtaaatttgccttatgtgaatgccattgcaaaggaagcaatgaggctgcaccctgtgcgcacaatgttggtgc

SEQ ID NO: 14587 - DNA, 116 bp, Glycine max
  Clone ID: 701068982H1
gtttgatgatgtttggagacggaggggaagatgcaaacgcgtcgttgtgaaaactgacaagcccgggggcgaaaaagtacgcgacgaatgtgaaacagcaccccaaaattgttgtg

SEQ ID NO: 14588 - DNA, 306 bp, Glycine max
  Clone ID: 701068983H1
cgagtcctcaaagatctatgcttacctcttcctctgcatgatctttctctcttccgccactcccattctccgttgtggctactgtggcaaaccccccaaaaagcacaagcctggtaacacaccaaagacacccaaaacacccgttgttaagccaccagtcaccatccctcccattaatgttcctcccgttgttcttccaccaatagtgaagcctccaggtattctccctccaattccaattattaacccaccacacacaccagggaagggagggaacactccatgcgcaccaccaaagtctcctgc

SEQ ID NO: 14589 - DNA, 292 bp, Glycine max
  unsure at all n locations
  Clone ID: 701068985H1
cggagaccaaaaggcaagaaaactctcaaaaaactattatagcaatggcagaacaaaaccaaaaccacacaactgcagctgccagngcacaagaggttggtcacaagagccttctccagagtgatgctctttaccagtatattctggagacaagtgtctacccaagagtacctgaatccatgaaagaactgagagagttgacagcaaaacacccatggaacatcatgacaacctctgcagacgaagggcagttcttgaacatgctccttaagctcatcaatgccaagcacac

SEQ ID NO: 14590 - DNA, 302 bp, Glycine max
  Clone ID: 701068986H1
attgaatctcagaattctctaaaagagatctttttctgctctttgaagaaagaagggtctttgcttgattttggagatgtctctgctctcagatctcatcaaccttaacctctccgataccaccgagaaggtgatcgcagagtacatatggatcggtggatcaggaatggacctgaggagcaaagcaatgactctcccaggaccagttagcgacccttcagagcttcccaagtggaactatgatggttccagcacaggtcaagctcctggtgaagacagtgaagtgattttatacccacaag

SEQ ID NO: 14591 - DNA, 303 bp, Glycine max
  Clone ID: 701068988H1
cgcttccgctctttacttccttttatgcctatcgcccatcactttgcttctttctgcgtttcgtgctcaagctcaatctcatgctccagctcccactttcaagtactgtgaaaagaatgcagactatgctgtgaaggtgagtggagtggaaatattgcctgaccccgtggagagaggagtgccattcacctttaagatcccagcttatactcctgaaccaattcaaagcggggacttgttatatgaaatttcttatgctggaatagaagcacaacctgctacatttctccatgatctctgtga

SEQ ID NO: 14592 - DNA, 298 bp, Glycine max
  Clone ID: 701068990H1
gggaaaaggggcaaagggattgataacaggtaaaacctcagcttcagccaaagacaaagacaaagacaagaagaaacccgtttctcgttcttctagagctggtcttcagtttcctgttggacgaattcaccgtcttttgaagtcaagggtgagtgccaatggaagagttggggccacagctgctgtgtattctgctgctatactggagtatctaactgcagaggtgttggagttggctggtaatgcaagcaaggatctgaaggtgaagcgtattacccctagacatttacagcttgct

SEQ ID NO: 14593 - DNA, 295 bp, Glycine max
  Clone ID: 701068991H1
cagattttgattcgattcgattcgattcagtcgaggttttaagcagcagcaagatgtctgggcgtggaaagggacgaaagggattgggaaaaggaggagcaaaacgacatcgtaaggtgctccgcgacaacattcagggaattacgaagccagcgattcgtcgtttggctcgcaggggtggcgtgaagcgtatcagcggtttgatctacgaggagactcgcggtgttctcaagatcttcttggagaatgtcatccgtgacgccgttacttacacggagcacgctaggaggaagac

SEQ ID NO: 14594 - DNA, 298 bp, Glycine max
  Clone ID: 701068992H1
caaggacacatttgtcttcagtatagatggcaccgtactctctaatattccatactacaaaaaacaccgatatggggtggagaaatttaactcgaccttgtatgatgaatgggttaacaagggcaatgcaccggcactgcccgagactcttaagaattacaacaagctggtgtctcttggcttcaagattatattcttgtcaggaagaacactggacaaacaggccgtaacagaagcaaacttaaagaaggctggctaccacacatgggaaaaattcactttcaaggatccacaagat

SEQ ID NO: 14595 - DNA, 284 bp, Glycine max
  unsure at all n locations
  Clone ID: 701068993H1
accactcgcatcttgttcctccgctcaacaactataacaacatctttctctctccgaacagatcacactatggccacctcaagcgccaaatcagtccatgatttcaccgttaaagatgccaagggaaatgatattaatcttggtgactacaaaggaaaggtccttatcattgtcaatgttgcctcacaatgtggcttgactaattcaaattacactgagctcagtcagttgtatgagacatacaaacagataggtctggagattctggcatntccatgcaatca

SEQ ID NO: 14596 - DNA, 279 bp, Glycine max
  Clone ID: 701068995H1
gagtgaaaaccttctcttacccttctctcaagtttcaagagatttcatcatggctccaaagaaggacaaggctccaccaccttcctccaagcccgccaaatctggcggtggcaagcagaagaagaagaagtggagcaagggcaagcaaaaggagaaggtgaacaatatggtgctgtttgatcatcggcactatgacaagctcctttctgaagctcccaaatacaagctcatcactccttccattctctctgatcgtttgagggataatggatcacttgc

SEQ ID NO: 14597 - DNA, 296 bp, Glycine max
  Clone ID: 701068996H1
ctcagccaaaacctgcaaaacctctacctgacatcatcagtcagagtggccaccagcatgccatagcgtatgtggagggagataagtattatggagccaaggcaaccataaacgtctgggacccaaaaattcaacagcccaatgaatttagcctttctcaaatgtggattttgggtggctcttttggtcaagatctcaacagcattgaagcaggttggcaggtcagccctgatttgtatggagacaacaatactagactcttcaattattggacaagtgatgcctatccagctact

SEQ ID NO: 14598 - DNA, 278 bp, Glycine max
  Clone ID: 701069001H1
tgcagatgctaggtgccaactctgggagaaggcatggagatcagggaaatgaaagatcaaatcaaagaacttgttggtctcttacggcaaagcgagatgaagagaaaggaagttgagaaggagctaaaagtaagagagcaagctgttggaaccacattggctacaccaccatctggagactccccaaatccatcgaaacaatatgctgaagacatgaaggggctcttatcaccagtgtctatgccagtgcctaaacagctaaaatacacgccagggtt

SEQ ID NO: 14599 - DNA, 285 bp, Glycine max
  Clone ID: 701069002H1
gcacaaccaacataaggcatggccttatcctctccctccctcttttcagctgtaaacgccacatattcagtaccccatttccatgcactgccactttcactttcttcttcttactttccaattaatgttagaccctccacccatcatgtccttgtctctgatcataatcacaaatggagaacaaaagtttcatttttcacttccttcttgaagcagaaaggtaaagatgccaagatcatcaaggaagaactccttgaggccattgcaccacttatcgaggggctg

SEQ ID NO: 14600 - DNA, 281 bp, Glycine max
  Clone ID: 701069003H1
gaatctggaggaatttgattgatggctgtaactgtacttcctcaattcgaatcccaattcagaaatatggatcatttctcaagtaccccaacaaaaaattgatgtccaaacgcagctatgtcccaatgaaaaaggcatcggtactgaggatcacagcatccatcaagaacaaggtttatgaagatcactcccagggcataatctgctaccaagatgagtttggagaaatagtttgtgaagggtatgatgaagggccttgtttccaaagattccagagacga

SEQ ID NO: 14601 - DNA, 281 bp, Glycine max
  Clone ID: 701069004H1
gtgaaaaactcactcactgagcggattgaaaatctgcccagaattcttgggttggaaaaggtggtgctcttactggagaaatcagcgcggaacaactaaaagatcttggatgcaagtgggttgttcttggacattctgagcgaagacatgttattggagaaaatgatgagtttatagggacgaaagctgcctatgctttgagccaaggtcttggggtgattgcatgcattggagaattgttagaagaaagggaggctggaaaaacttttgatgtttgtttt

SEQ ID NO: 14602 - DNA, 283 bp, Glycine max
  Clone ID: 701069005H1
ctcaaagtttcacttcagccttatccggtttagggtttcggtttttgacccaacctttgacgtatcgaaaccttaagtttcggatcaggtctgagcaatctggttggtagaacctttggtcttagagagtcaagttttatgtctgaattagacgatcaaattcctactgccttcgatccttttgctgatgcaaatgctgatgactcgggtgctgggtcaaaggagtatgtgcatattcgcgtacagcagcgaaatggaaggaaaagcctgacaaccgttcagg

SEQ ID NO: 14603 - DNA, 283 bp, Glycine max
  Clone ID: 701069006H1
ccctacttctacttcccccctttgctctcaaacttatcacctaatccttatcctcccaaaccagaaaaccatgtctacctccgcagcttccctcgcactcccaaccctcactctccgaacccgacaacctctatgttctccccaatgcttctcctcgtccctctccctcacacccaacaacaaacccatttccatttctgctgtttttctcaaaccaacaactctgtcgtcgtctcgcttcgttccccacgtcgtggtgtcgtcggatttgggcaggaggagg

SEQ ID NO: 14604 - DNA, 286 bp, Glycine max
  Clone ID: 701069007H1
aagaactagaactagggtttcatctttgccatcagtaaacgacaatgatttacgacgttaactctcctcttttccgatccttcctcagccagaagggaggctcctctgataagaggaaatcggacgaacagaagccaaaagagcagaaacccaaagccagcgagaacaaacctataatgactgagtgataacagctgagctgcattcagttgtagaatgaaaataggtggtaggtactgtatttggtgctaaactaagatctttttggctgtgtctgaagtatatg

SEQ ID NO: 14605 - DNA, 284 bp, Glycine max
  Clone ID: 701069008H1
gggtttttctagggtttggaggctatgccgaaaacgggttaaataagctcggaaaatgattctcacaaaagcagtaccgatgcatacactcagctagttgtcaatgtactaaagggcatttaagtgaagatatgatattcttagtatttcataatttgaattggaatcccaagctaattgcaactctatcatgtgtgtgcaaatggtttgatgatcttgccaagcgagttctatggaaagagttttgtcgaacaagagctccgaaaatgttgttgatctgcaat

SEQ ID NO: 14606 - DNA, 283 bp, Glycine max
  Clone ID: 701069009H1
gagtttgttgtgagctataagctagtttatcgtgaggagaatatgaagttgtttgttttcctttgttgttgcagaagttttggtagcatggccatgccatggcgcaggctaccaaaggttccctctccgaatgaaaactggctatggtgagcgttcttcggaggtaaaatgcgcaagttttaggcttgctgtggaagcacacaacatccgagcctttaaaaccattcctgaagagtgcgttgaaccaacgtaggactacattaatggcgaacaattagatcag

SEQ ID NO: 14607 - DNA, 174 bp, Glycine max
  Clone ID: 701069011H1
tctcgcgcttcgcggattacccaagaagaacaaacaaccaaccaaacacagcaccctcaacggggcgtgagagagagagagacattgctaaaagacaaaaaatactcgaaagaacaccatgaaagttctgattaacaatccgaaaccatttctctcatcaccaaactccatttt

SEQ ID NO: 14608 - DNA, 288 bp, Glycine max
  Clone ID: 701069013H1
gagataactagaaacagtgtgatgaaaatgaaggtccttgttttcttcgttgctacaattttggtaacatggccattgccatgggtaggatatgttccctctccgaatgaacactggctatggtgcccgtactccggaggtgaaatgcgcaagttggaggcttgctgtggaagcacacacacatctttggctttgagaccattcctgacgagtgcgttgaagcaacaaaggaatacatccatggcgaacaatatagatcagactccaaaacagttaccaacaagctta

SEQ ID NO: 14609 - DNA, 289 bp, Glycine max
  Clone ID: 701069015H1
gaaacagtgtgatgaaaatgaaggtccttgttttcttcgttgctacaattttcgtagcatggcaattgccatgggaaggatatgttccctctccgaatgaacactggctatggtgcccgtactccggaggtgaaatgcgcaagttggaggcttgctgtgccagcacacaacatctttggctttgagaccattcctgaagagtgcgttgaagcaacaaaggaatacatccatggcgaacaatatagatcagactccaaaacagttaaccaacaagcttattttatgccag

SEQ ID NO: 14610 - DNA, 269 bp, Glycine max
  Clone ID: 701069016H1
tcttaaaccaagccacaaatcaaccttgcaatccaaataattgaaaattccataccagacagtgtttcaggtaatcccaattgtcccaattttggattctgaatttgaagcaggccatgatgctgatccaccagtatgtattattgatgctgatccaccaaaatccaaaggtgatctggaatcagtcttgaaggcttgagaaagaggagttggagtcatcactgagcaaggagaaccagcaggttcttcaattaaagcaggatctggtg

SEQ ID NO: 14611 - DNA, 286 bp, Glycine max
  Clone ID: 701069017H1
attccaaagacccttttgaagtaatcgatggagtttcagtctctttccagattctaccttcttctttccttaaccattctcttccttgcaccctttcacgctcaagctaaaattaaagtcacttactgcgataagaaggcagactatcctgtgaaggtgtctggagttgaaatatcaccagaccctgtggagagtggcaagcctgctacctttaagatctcggctacttctagtaaagctatttatggtggagaagttgtaattggagtttcaacgttggggtgcc

SEQ ID NO: 14612 - DNA, 284 bp, Glycine max
  Clone ID: 701069018H1
caaccatacagtactcctcactagctataccctggttaatccatggagaaagaagctgttggccttgaaatcactactgagctaaggttgggccttcccggtggggaattacctgacaagaacgagaagatacagaagagggtgttctccgagattcaagctcatgatgatgatgaaaacagttcctccgaacaagaccgcaaaatccaaaccaagaatcaagtggtggggtggcctccggcgtgttcgtaccgcaagaagaacaccgtcaagaaaccaaaatg

SEQ ID NO: 14613 - DNA, 282 bp, Glycine max
  unsure at all n locations
  Clone ID: 701069019H1
caaaactcaaaacttctcttttctttcattctctctcttttattcttatcatcacaatgccttcaattcncgaagcgcgcctcctggctccgaacccggatcgcttctgcatgttcccaatccaatacccgcaaatctgggaaatgtacaagaaagccgaagcctcgttctggacggcggaggaggtggacctctcccaggacctccgccactgggactccctcaccgacggcgagcgccacttcgtcacccacgtcctcgccttcttcgcgcctccgatgg

SEQ ID NO: 14614 - DNA, 203 bp, Glycine max
  Clone ID: 701069020H1
ttccgccatacctcacctcatatctacgtcgtcgtcgtcgatcttctgttcagaataataattttagatctctgatgcaacagaacaaggaatcttcttagattctttttctggaagaaagagaaaacagaagaagaaactcttcttctttagacccgtcttatatatttatatacagtctctgattgatcggttttttcgga

SEQ ID NO: 14615 - DNA, 279 bp, Glycine max
  Clone ID: 701069021H1
ggtgaatgcgtagaaaaggaaaataaagaaattcgcgtgaaaaatgttgggtgtgttcagcagctccatagtgtcgccgccggaggagctcgttgccgccggcagccgtacaccgtcgccgaagatgacggcggcggcgctgcggaagtggttcgaggagaagaacccctccgcagtgtcggtggaggtcggagagcatgtccagctcgcttatacccaccagaacgagtcgccgtttcagcccagatcctttgctgtgaaggatgaggtatctgcttg

SEQ ID NO: 14616 - DNA, 285 bp, Glycine max
  Clone ID: 701069022H1
gctaaagatactgctttgtgcacttcctgtcagtgcttgtggtttggattcagaatcaactaaaacaaaagaagaccaaggagatagtattcaactatgtaaatcagctgtgcgagagcttgccaagtccaaatggagagtcagtagtagactgtaatagcatttatggattgccaaacatcacgtttactgttggagacaaacctttcaccctcacccctgagcagtatattctgaaaactggagaaggcattgcagaagtttgccttagtggtttattgcttt

SEQ ID NO: 14617 - DNA, 282 bp, Glycine max
  Clone ID: 701069023H1
caaaagattaggttttgtcatgtcgggcatggacacgcttcagaggctgttcgcgggtgcccgtggaacggctgggccatcccccaccggattcccccaccctcgattcctccgagcaggtctacatctcctccctcgcccttctcaaaatgctcaaacacggaagagctggggtacccatggaagtgatgggtctgatgttgggggagttcgtggatgcgtacaccgttcgcgttgtggatgtgtttgcgctgcctcacagtgggaccggtgtagcgttga

SEQ ID NO: 14618 - DNA, 286 bp, Glycine max
  Clone ID: 701069024H1
tctcttgcttcttgcttctattacttgcttctttcttcaccatgtcacttgctgggaaaatcaccaatgaaattggggttcatgcaaccgctgcaaagtggttcaacctctttgcaacacaacttcatcatgttcaaaaccttactgatagagtacatggaaccaagctgcatcaaggtgaagactggcatcacaacgagacagtcaaacactggacttataccatagatggtaaggctacaacatgtctggagagtattgaatccattgatgacagaacacaaca

SEQ ID NO: 14619 - DNA, 286 bp, Glycine max
  unsure at all n locations
  Clone ID: 701069025H1
cacacacacaaacatatgctacaaactccacttcttcaacacaaaaatccgaatcttatggtncaaaaacaaaaaattgaaacctaaaatcaccattcctcttgttgtctctactacttctcataacttcaccctccttggcaacccgacccgcatccaaccctgatcaagtcaagcacaacaaaaacaacaaccaaggtggtggtgctggtgctggtgctggcgggttctttggccctggaggagggttcagcatacccggttttggaaacgggttggaaatggc

SEQ ID NO: 14620 - DNA, 286 bp, Glycine max
  Clone ID: 701069026H1
gtctccaaagtcagacacagaaactaaaattgtataagaaccaaaccccaaacacttcatttttccaaattttcaatatcttcccttagtttcctccttcctctcaagcatgtctattgcttcatcatcatcatcttcttcttctatttgggtgttgtctaacataaaacttcagttctttggccgcatcagaaggtttctccaatccaaagcaaccaaaaagcgttatgacccctctgatcggtttgacacagctaagagcacagttgaacacaaaacaaggttg

SEQ ID NO: 14621 - DNA, 91 bp, Glycine max
  Clone ID: 701069028H1
attttcacatactggtgttcacaatgtggtcgagcgctctgatactagcctctgtctttgtaagggcaagggcaaacccctcctccacaag

SEQ ID NO: 14622 - DNA, 287 bp, Glycine max
  Clone ID: 701069029H1
gatcccacaagggtgccatgtcacatgtagaacctcaaaactgtgatgaagaagcagatttttggggatccaaatggcatctgtttggaatttgggaagagggatattggtccatacaggcaattatgtgcaattgatgccaaatctttcaatccaaaacgaactgcaaatactttatttttactacatcggttgacactactttttaggaacgtagcctctgtcaacttggaaaacctcaaccatcaggagaagcttgcattctggatcaacactacaattcgtgt

SEQ ID NO: 14623 - DNA, 286 bp, Glycine max
  Clone ID: 701069030H1
gaagcgaggcaggaaaatcgaaatcgaaaatggcataatggagaggttgaagatgttcgtcggtccaaaagccagttgtcgccgcttcctgtctcatcgctggcttcggtctttttcttcctgcttttgtgaggcccatgttggattcatatcaggcaaccaagcaacctcctcaacctgctttaagcgatgtggttgcaggtatgactggaaaaaagtaaaggtgatttacttgacagatacaagtgcaaatttgctaatttccttgtttgaactattttaattc

SEQ ID NO: 14624 - DNA, 286 bp, Glycine max
  unsure at all n locations
  Clone ID: 701069031H1
ctaaactccactcccagtaaaagttaaattcatttacgtctggtctttttcaacggtaaacaatccattggggtncaatatctagtcataataaatgtcatcatccccgcaggagttgggatcacaaatctttcgctaacactcattaattgcaagaatggcacttcgttgcttggtgatgtccctttctgttctcttcactcttggtcttgcgagagaaagccatgccagagacgaagatttttggcatgctgtttggccaaacactcccattccaattcattgc

SEQ ID NO: 14625 - DNA, 291 bp, Glycine max
  Clone ID: 701069032H1
tggaagatgaacttgaacagagtactgaagttcaaataatatatccagctgagccaaagccggtcctccggggaattggattgggaattagatgaccttgaggagttaactgataagctcatagaggaggaggagttatcagaagatcaaaaggatgcatttaaggaatttgtcaaggaaaaggttcgtgaagcaaagaaagctaatagagaggcaagggaagctcgaaaaaaagccattgaagaaatgagtgaggaaactaaagctgcgtttgagcgatgagattttata

SEQ ID NO: 14626 - DNA, 277 bp, Glycine max
  Clone ID: 701069034H1
cgatgcctgagggaagctggaagtgcgaaagtgtaacaacataaactatcctttcagaaccaagtgcaacagacagaattgtggtgctgacaagccagccgagtctgaaaaatctccttcaccagctgcagatcaaaatgatcagtgagtactaggacatgtttgagggttgagaaggtccagagttgtcatcaagcattgctcagtttgggtgtctgacagtcagtcttgtcgtcttctatgttgcagcagttgtcaagtcactcacttctcaata

SEQ ID NO: 14627 - DNA, 280 bp, Glycine max
  Clone ID: 701069035H1
gtactttcaaattaagtctctgcattattctcttcccttttctatctccctctgcaaaaacgaagtaaatgggtcggcttaatctcctacttgtgtggtcactctctttaacacttttccttacttatctacacccaacctctgcccagctcagtccaaaccactatgctaacatatgccccaaccttgaaagcatcgttagacaagccgttactaataagttccaacaaacctttgtcaccgtcccagccacccttcgcctattcttcacgattgcttt

SEQ ID NO: 14628 - DNA, 281 bp, Glycine max
  Clone ID: 701069037H1
cgaggctgaaacaaagaagtgaaaataaagcaaaaagtagcagctgctgcagctcccccgaagcttatctcagcagcagatactcaaccctgtttgagtagccgagaataacaccaatgggagaggaggaaaagaaaccagaggaacaacccaaggcagaggagaaaaaaccagaggaagagaagacagaaagaagaagcagcagcagcggaaaaaccaagcgaagagaaaaaaccggaactagagtcgaaagaggaagttgctgctccccaccgccaccg

SEQ ID NO: 14629 - DNA, 283 bp, Glycine max
  Clone ID: 701069039H1
gttttccgcggaaaatcaaaatgggtatcatgataagatcaaagaaattgaagccgagatggctcggaacccagaaaaacaaactaacagagtatcatctctggcagctcaaggcaaaaatagcaaaactgaggacacaattattggagcctccaaaaggttctagtggaggtggagaaggatttgaagttacaaaatttggtcatggacgtgtggccatgattggatttccaagtgtggggaagtctactcttttgacaatgttaacggcacacattctgaa

SEQ ID NO: 14630 - DNA, 280 bp, Glycine max
  Clone ID: 701069041H1
ggtttctccaccaagagggaaatggctcccaaccgcctagtacgggtctgtttgttggactgaaccaagggacatgtcgtcaccaagaaggaattgcccccacgcccctcggatcgtaaggggaaaacaagcaagagggtgcactttgtgaggaccctcataagagaggttgctggttttgcaccctatgaaaagcgtataactgagttgctgaaggttgggaaggataagagggcacttaaggttgcaaagagaaagcttggaacccacaacgtgcaaa

SEQ ID NO: 14631 - DNA, 284 bp, Glycine max
  Clone ID: 701069042H1
ggagaaaggggccgacgacggagcaacctcggcggcgacgagccggaagaaagccgtcgtggagagaaaagggacaaccacagaaagaggaaaaagacgaagaagagcaatagcagcgaaaatatactcaggacttcaagctcaggggaacttcaacttgccaaagcattgcgacaacaacgacgttctgaaaactctctgcgcagaagctggttggtgcgtagaagaagacgggaccacttatcgcaagggttgcaagcggctctagccaatgtgctgggagt

SEQ ID NO: 14632 - DNA, 280 bp, Glycine max
  Clone ID: 701069043H1
cgccgtcgtcgctgtttgtgtgtgtatcaggtgcagctaccaacgatggtgaagggtcgtcaaaggagagcggcgtcaaattcaacgtgaggggtacaatcctgcgatacaaaaggtccaagtccaaccagtacccaaacacatccctgatccaaattgagggagtgaacaccaaagaagaagtaggacggtatgctggcaagtaaatggcctatatctacaaggctaaggtgaaaaaggatggaagccattaccgctgcatatggggcaagttacgagg

SEQ ID NO: 14633 - DNA, 283 bp, Glycine max
  Clone ID: 701069045H1
ttcacaaatctttttctaagtgtagtagaggagaggaaccgcgccaaccctctcttcttctttctcttccatccctttttaaacatttatagtttcatccttaatcgttgggaaaaatgttcatcgagaattttaaggtagagagtcctaatgtgaagtacaccgagactgagattcagtccgtgtacaactatgaaaccaccgaacttgttcacgagaacaggaatggcacctatcagtggattgtcaaacccaaatccgtcaactaccatttaaaaccaac

SEQ ID NO: 14634 - DNA, 289 bp, Glycine max
  Clone ID: 701069049H1
ggtctccaaatacctgattgaaggcgacctgagacggttcatgcggttaatataaagagactgaaggatattcagtgctacagaggaataaggcatattcaggggcttccttgcagaggccagcgaaccaagaataattgcagaaccttgaagggtaagaaggttgccattgccggtaaaaagcgaaagtaaacggctcctattttttgtgatgttgttttctaattgtcaatgttgtaaggcaaagaataataatgttttctatataattcaattgtcttgtttaagt

SEQ ID NO: 14635 - DNA, 278 bp, Glycine max
  Clone ID: 701069051H1
ggcatttcagtcaacagcgtgaattcagttcagagaagatacaggctataattgatgagacagttaatagtcgaaatcttgattattcacacttcatatcccttccattggccattcatcctgagttggttaataaactcatcagttttcagcattcaatattgggaattggttcttgcatggatgagaatacctatactgaatctgattccaatgaggatgagggtactactactgacaccaaagaagtggaccaactatccaagaaaattccggtg

SEQ ID NO: 14636 - DNA, 279 bp, Glycine max
  Clone ID: 701069052H1
gttaattctcaaggatccacatcttatcctccaaatgcactttcatacaaatcagcaatgagagagcatctgttgaggcagggatacagaattgttggaatcattggagaccaatggagcgatctgcttggagaccacagaggcgaaagcaggacctttaagcttcctaatcccatgtactacattgagtagtaccttcacctctctcaacaatctagctagagtttgctcctatctatatgtaataaggtatgctgatatgcactattcaaataggag

SEQ ID NO: 14637 - DNA, 280 bp, Glycine max
  Clone ID: 701069053H1
ttcccatgacactttgagagttcaagttccttttctttcctacaaatccaaaataatagttttagtttacaaaatggctgtggaactcatggggttcccaaaactagacgaacaaaaggccattcaagaagccgcatcagaaggcctcaagggcatgaaacacctgatccgaaccctttccaaccaaccctctcaactaaacaccgaacttaccgacgttaccgtttcaaagttcaagaaacttatttcactcttaaatcgaaccggcacgcccggttca

SEQ ID NO: 14638 - DNA, 264 bp, Glycine max
  Clone ID: 701069055H1
cttgtcaaacaaagccattgacaaagagaagctcaagaaatatgagccaggtaggttcgatttccaaagtgcagctgtgttcatggctccattggtcctattactcatagccaacattgttagcttctttgttggtatatggagactattcaatttcaatgtgaaggattttgaagaaatgtttggtcaacttttcctagtcacctatgtaatgcttcttagttatcccattcttgaggccatagtaacaatgaaaagcaaagt

SEQ ID NO: 14639 - DNA, 271 bp, Glycine max
  Clone ID: 701069056H1
gctgttaaggttgttgacattgttgacacattcagacttcacgagcaacccgcattcgataagaaacaagtttgttaccttcatgaagaggtttatcaagaatttgactcccaagctcgatgcagagcaacaggagttgtttaagaagcacatcgagggagcaactaaatacctgctctctaagattaaagatttccaattttttgttggtgagagcatgggtgatgatgcttgcttggtctttgcctactacaaggacggcgctgctgat

SEQ ID NO: 14640 - DNA, 280 bp, Glycine max
  Clone ID: 701069057H1
ggcagtcttgtcgtcgtctcttcctcttacgaacaatggttgccgccaagaaaaccaagaaagaccatgagaggatcaacaacaggcttgctcttgtcatgaagagcggcaaatacacccttggttataagaccgttctcaaatctcttaggagctccaaagggaaattgattatcattgctaacaactgcccccctttgagaaagtcagagattgaatactatgccatgttggcaaaggttggagttcatcattacaatgggaacaatgggatttgggc

SEQ ID NO: 14641 - DNA, 282 bp, Glycine max
  Clone ID: 701069058H1
atttctccatttccattttctctctcactttacaagaatcgtaagctatgggaaagtcttacccaactgtgagtgctgattaccagaaggcggttgagaaggcgaagaagaagctcagaggcttcatcgctgagaagagatgcgctcctctaatgctccgtttggcatggcactctgctggcccctttgacaagggcagaagaccggtggacccttcggaaccatcaagcaccctgccgaactggctcacagcgctaacaacggtcttgaatcgctgttagg

SEQ ID NO: 14642 - DNA, 281 bp, Glycine max
  Clone ID: 701069060H1
cgcaattgatgcattgcctgtttctgctcatcaatgactcaattcacaactaatgtcatggcccttcaaggtgcaaagtgagtttcagaaggcatatgagggtgggatagctaaggcaaggtattgggagccaacttatgaggatacaatgaatctaattgctcgtttgccagccattgctgcttatatttatcgacggaaatacaaggatggaaaaatcataccgttggatgattctttggattatggtgcaaactatgctcacatgtagggtttgatga

SEQ ID NO: 14643 - DNA, 281 bp, Glycine max
  Clone ID: 701069062H1
gaagagaatcataagacagcaagacagaaaatgggagtggagaagcagttgttgaggcctggccacgggccccaagccaattcccggtcagaacgtcaccgttcactgcactggtttcgggaagaacggtgacctttctcagaaattctggagcaccaaggatcctggccaggaccctttcactttcaaaatcggccaaggttctgttatcaaaggatgggatgaaggtgtgcttggcatgcaaattggtgaagttgctcgtctccggtgctcccggatta

SEQ ID NO: 14644 - DNA, 286 bp, Glycine max
  Clone ID: 701069063H1
ctcttctgagttctgagctagcgaggttgcaatggcgattatctccgatttcaacgaagaggagccggaaccccattcattcttcaccacggcaaccccaatcctcttcctcttcgtcttcctcttcgttcagtgctgcttttgaccggtcaaaccctatcgcttttctggagagagtcttccagttcgtctccgaacacagcgactttctggcgacggagagcgccgagaaggagatagcgttgctggtgcgcgccgccgggaagaagaagaggagtttctcaag

SEQ ID NO: 14645 - DNA, 286 bp, Glycine max
  Clone ID: 701069064H1
cgaaacctcaaccccaacctcaaccttaacctctcctcactttcttttcaaccagaactatgaataagccttttaaaagtaaaggaaaaacagagagaactggcagaaaatgcgagtggcggaccacccgttaagaagcaaagtgccggcgagttgcgtcttcacaaagatataagcgagctgaatctaccaaaatcatgtaccatgcaattccccaatggcaaagatgacctgatgaactttgaagtttcaattcgacctgatgatggatattcttaggtggcac

SEQ ID NO: 14646 - DNA, 280 bp, Glycine max
  Clone ID: 701069065H1
caaccctagacgtcgctcatggcttctgagaacgtaagccccgagacagtatccaaagccgtcgatgctctcctccaatggcgccgctcccaatcggagattcagaaaccaaaactcttgggcgaagacgaagaattcgtgtacctgatcctcacgctgaagaagatcccttcaaaatcccgagttaaccctcacaagattcctctcccgcactccctcatctcccctttctccgagcagtgcctcatcctcgacgaccggcccaacaggcccgcgtcac

SEQ ID NO: 14647 - DNA, 277 bp, Glycine max
  Clone ID: 701069066H1
ttcgcaatccgttccaaaccacatagctttaacaaagatggatgtagaaaagttgaagaagatggccagttctgttcgaactggtgggaagggtactatgagaaggaagaagaaagctgtccacaagactactactatagatgacaaaaggcttcaaagcaccctgaagaggataggagtgaatgctatccctgcaattgaagaagtcaacatctttaaggatgaaatagttatccagtttttaaaccccaaagtacaagcatctttgctgccaaca

SEQ ID NO: 14648 - DNA, 275 bp, Glycine max
  Clone ID: 701069067H1
gggttagcaacgaggttgtgtacagaagaaggggtacaccgactcaaccggagcatacacaatgtacgtggatgaggatcacgcagatcagatctgcagtgccaagcttgtaagcagccctcaccctcaatgcaaggacgtcaccccaggccgcgacgaagccgtcgtgattctcacccgctacaacggcattgcctccgacgataggttcgccaatgccatgggcttcatgtctcaggaggttgcttctggctgtgctgagatctcaggcaata

SEQ ID NO: 14649 - DNA, 277 bp, Glycine max
  Clone ID: 701069068H1
caatcccaatgttctcacagtgccatttctctctcactccccaattcccaatactacctttcctcctcagagccatggtgcctcacagcacgcctcttgaactcaatcgcttcgccgaggtcggtaacaaagtcgccgatgctgccggagaagttatccgcaaatacttcagaaaaaacttcgacgttattcacaaacatgatctcagtccagtaaccattgcagctcaatctgctgaggaggctatggtttcaatcatactagcaatttcccttct

SEQ ID NO: 14650 - DNA, 272 bp, Glycine max
  unsure at all n locations
  Clone ID: 701069069H1
acggcgaagtatcgccgaagggcacaaccgtcattcccactccaaaccgtttcttctatcctccactctccccatcncaataacaaagagaggaatcgaagtctgttccgttctgatcagaaagggaataacggtaacggagatatggggcttctgtctaacagagtaactagagagagcctgaaaccaggggatcacatctactcttggaggactgcttacatatacgctcatcacggcatttatgtcggcgatgacaaagtcatcacttc

SEQ ID NO: 14651 - DNA, 280 bp, Glycine max
  Clone ID: 701069070H1
cttcccttctccaacatgccaaacgaagcgttctgagtcttttcttcttcgttaccctgcttcgcatgccttctctctgctaaattcccacgatgaccatattttgctaccgagtcaactccatgacgatgactcagtgagttgcactgctaccgacccaaaccttaactacaagccggtgatccggaatcctgacccacccggcggaggtgcctctgagcggctcagcaacgccaccggggtttcttacatcgccgcctcctacgttaattcgtggagt

SEQ ID NO: 14652 - DNA, 277 bp, Glycine max
  Clone ID: 701069071H1
tgttattgctagacagaagagttgaaaacaaaagaaaagcctaacctcaatctcttgttctagttcttaatcctgttgttctaatatggaggaagaaagcacttcagcggaatccaatccttcttcgagcgaccgcatcaaactaaacgtgggcggaaagctcttcgagacgacgttctccacgctccgttctggcggcccggactcgctcctcttcgcgctctcgaaccgccgatccgccgacccgagccccgtcttcatcgaccggacccggaga

SEQ ID NO: 14653 - DNA, 277 bp, Glycine max
  Clone ID: 701069072H1
cagcgtagtatcagcactcagcagttcaagtaatactaaactaaaactcaacagaaaagtgtttcatttgtttctcccaagtcagaacacaacacaacctaactaaacaattctgtcgatcgctttttccttcttcactccactctcttccaaatccgttccatcgtctccctctatacaccttctctctgatttcgcctcactcccctccgccgccccaccgttcgctatttacctctctgctcctccgccggaggacctggcggcgatccttcgg

SEQ ID NO: 14654 - DNA, 282 bp, Glycine max
  Clone ID: 701069073H1
tcgacttcaccgccggaaacggaaccgtggccgagtcgatttatggctccaagttcgccgacgagaaattcgtgaaaaaagaacaccggtcccggcatcctcaccatggcgaacgccggtcccggaaccaacggatctcagttcttcatttgcacggagaagacagagtggctcgacggaaagcatgtcctgttcggacaagtcatcgaaggattgaacgttgtcaaggacatcgagaaggtcggatccagctccggcaggacctccaagccgttgtcatcg

SEQ ID NO: 14655 - DNA, 277 bp, Glycine max
  Clone ID: 701069074H1
cgcgaaactccctttcctgagatcagcccaccattctcgagaagatttgccagtacttttaatggccactccaaatccgccatggggaaggagacggaattttccattgaacctgaattaactctggagctaatgatggccgccaattacctccatacataagcattttgacttccccacgggtgatagttcttcgtcctcataatggaactattgcttagttgtgcattcaaagggaaatcagcgtattattgtttacattgaaatgtgcccttgc

SEQ ID NO: 14656 - DNA, 73 bp, Glycine max
  Clone ID: 701069075H1
caaagccgaaggtcacattcaattcaaaacctcggcgttttatcggacttactaaggtctagtggtttttaac

SEQ ID NO: 14657 - DNA, 280 bp, Glycine max
  Clone ID: 701069076H1
gagaaaaacagatagtgtgggagagagagagcggaagagaaaatgacgaccaggttccagaagaacaaggaggagaagaggtcacgtcacggccggacacggccgtatcggaaagcaccgcaagcatcccggaggtcgcggtaacgccggtggcatgcatcaccaccgtatcctcttcgacaagtaccatcctggtttcttcgggaaggtaggcatgcgctacttccacaaacttcgcaacaaattctacaatccgatcatcaacatcacaagctgtggt

SEQ ID NO: 14658 - DNA, 280 bp, Glycine max
  Clone ID: 701069078H1
gagtgcgttaggcttattgggacaaaagtacaagtttccttgaattttgcttgaagcaatctagatcagaagctgagattgcttcttatagaaaaccttggatcatatgatcctgaccatcaattcattgataaattcctcaattacaaggagttgttaccgtcagacgttttggacatagcttttcagagtaggaatgataagaaagttactggatatggtgtggaaggcacggcatcggttagtgcagatatactggatgtggactcactgaaggatc

SEQ ID NO: 14659 - DNA, 280 bp, Glycine max
  Clone ID: 701069079H1
ccaattgattgtcctcttattgctaaagtcctgtcataggcaactatgtactcgagggtaacaaggggacaagtaattgggtgggtaatagcattcacatgcttgggggtgtttgtcctcacatttgcagcttcaaataaaactatgatcagttctgttcgttttgcattatgtggagttggtggctgtcttcttctgtctggttttgtcttcctaacctgtatggatcaagatgatgcaaggcacaactttgggcactctggaggtttacttgcccatt

SEQ ID NO: 14660 - DNA, 279 bp, Glycine max
  Clone ID: 701069080H1
cggcggcggtggcggcggcatagagtggcagtagtaaggatcaatggcagttccagggaggcgcaacggcatgaacgacgaaggaagaggatttagacgacaaggcccttttcgaagaacaaggtgccgtcgaagacgaggccgatacccctcctcacctccgcgacctctccgccgccgctcagctaggcgacgtccacgccctccgtatcgctcttgataacttgactggtagtattgatgagccagtggaggatggggatactgctctcatttgac

SEQ ID NO: 14661 - DNA, 275 bp, Glycine max
  Clone ID: 701069081H1
aaatgagtctctctttttgttccttctaaggctaagccttcctagatagtagatccctttacactttacggattccaatattgtcaaactcactgtggatgaggctgcagccatgcattctaaaccctcatctatcacttccaattaccctctcatttctgccattgttgcttttgctctagctcaatccatcaagttcttcaccacttgatatgcaggtttaaggatagaagatgggatctgaagcaattagttgggtctggtgaatgccatca

SEQ ID NO: 14662 - DNA, 274 bp, Glycine max
  Clone ID: 701069082H1
gaaaaaagagaaacaaatggcagcatgggtggctttaccgacatcaccggagcacagaacagcatcgatatcgaaaatctcgctcgctttgctgttgatgaacacaacaaaaaagagaatgcagttctggagtttgtgagggtgattagtgcaaagaaacaagtggtttctggcaccttgtactatatcactttggaggcaaatgatggtgtgacgaaaaaggtttatgaaactaaggtgttggagaaaccatggttgaacatcaaggaggttc

SEQ ID NO: 14663 - DNA, 275 bp, Glycine max
  unsure at all n locations
  Clone ID: 701069083H1
cgcaaaccctctttctcctttgtctcctcaccctatctcctctaccgcacactgtcgtctctcancaaacctgtaactgcactgctgaacctgcaaacgagttggggttcgttactatcacgattaagttatggaggagcaattcatacttagagttccacctaatgtggcagaccggatagagcgtcttctgaatgataacaatgcttcttcatctgaagacaagtcactagatttgtcatttcgagaggatggaagaagtggacgtttatgat

SEQ ID NO: 14664 - DNA, 274 bp, Glycine max
  Clone ID: 701069084H1
gtcaccgactcagttgttgtcagcggtgagtgagtcgtttctctgcagcaacaaggtttagccactccaaacagacgagaaatgggtcgtggggtcagtgctggtcgtggtcagagttccttaggttatctctttggcagtggggtgcctgccagcagtgcaaacagtcagcctgcaaatggtgctcgcactcaaaatgctagtgctccttcaccaccagtcgataagcaaagtccagcaccagcaccagcaccagcaccagacctgcatcatc

SEQ ID NO: 14665 - DNA, 276 bp, Glycine max
  Clone ID: 701069085H1
ctttctcactctctttatcttcacctttcagtttaaagcttcagatcacaacagatccaccattcacctcaccactttctcttcacaaggcaaatctaacaagaaaaagtagtctctgaagccgatccagtgtcttgtgaatttggaattggtagtgaatttagatctaaaaagccatagcaatgtcttttatcggtacccagcaaaagtgcaaggcttgtgagaaaacggtttatccagttgatcagctttctgctgatggcatgcttatcacaa

SEQ ID NO: 14666 - DNA, 280 bp, Glycine max
  Clone ID: 701069086H1
cttatcctcctcctaaaaattggtcaaatctatcctatctctttgcctattctttcttatcatcatcttcttctttcttacctccagaattgaaaagttcttcctactgcccatagtctttgacacccttttccaatctctagtttttagattttcttccctctataattatctccttcacaaaccttctatccctcataacatcaattaccacaaacccaagccttgtacctctcaaagtttgattctattctcttgcccaaagcgattggattgctat

SEQ ID NO: 14667 - DNA, 281 bp, Glycine max
  Clone ID: 701069090H1
cagcaacgagcaagataaggcaaagaaagggttagaaggcactgccatagatttacctaataaacggcggggtcaacctgaaaagcggtaccagtgacgacgacttcaccaacattcttgcacacatcaaatcctcgcaaacccccgctgtcatcaaatctggcgctccttggtgtcccgtttgtgtccaaattctcccagcattctgtagactgagcaataatttcccaaacttacctttgtatacacagacatcgatgaatgcccagaacaactcaaca

SEQ ID NO: 14668 - DNA, 231 bp, Glycine max
  Clone ID: 701069091H1
tttccggtttcactcttctaaaatggcgaatctagcacgcttctccaagagagccctaagaagcgcacacggggtagcaagggccccaggtgcagcctcagctgctgacagcagaacgcgctttttcgacggatgcgccgacatcgattaccccgtcggcggatcgcgtgaagtgggactaccgtgggcagaggaagataatcccgttggggcagtggctccccaaagttg

SEQ ID NO: 14669 - DNA, 275 bp, Glycine max
  Clone ID: 701069092H1
ggagcacatgcagtactgtgttgagcacctgaagagataagcaagcttgctaaggtgaaagcttcaagttctggaagttaaagatgtcatgatggagaacattgaaaaggttctggaccggggggaaaagatagagcttctggttgacaaaactgaaaatcttcatcaccaggcacaagatttcaggaatcctgggaccaaaatcggtagaaaatgtggctgccaaacatgaagataaagctgattgtgttggcgattttgatagcctgatcctc

SEQ ID NO: 14670 - DNA, 277 bp, Glycine max
  Clone ID: 701069093H1
gtcataaggtcactcaaggtatcatcaataggcatagttatattaatgtgtgatgtgttagaggatatgcgcattggtgaagattgaaattagaagcaagaatgaggagggcatgcaggaaaatatggcgatcggtgccttgcacgagcaggaaaagcttgcgaaatgactctaggaaggacatggaggagattctgagggctaagctttcaactattaaggaagagccagaattgtgtgatgagaacttagcatcaccaagacatggtgtatggcc

SEQ ID NO: 14671 - DNA, 267 bp, Glycine max
  Clone ID: 701069094H1
caaagatttggattgaaccagaaaatggctgagattttgattgatgtatagtgttgcagcgtgagggtttccaaggtgtcatggatgtcctcttgttcaagagggagaagggtaaaccttaaattccatttgtcccttcatagcttagtgaagggagattttatactgctcggccaggttctcttgtccagttgatgcatgtgaaccgcataagcttaatgtatatattcttaaatttaaaaaaaaaaaaaaaagggggggccgccg

SEQ ID NO: 14672 - DNA, 281 bp, Glycine max
  Clone ID: 701069096H1
ccaagatttggattgcaccagatcatgagtgagattttgattgatgtatagtgttgcagcgtgaagttgttaacgtgtcatgtgctgtactctttttcaaaagggataagggtaaaccttaaattccatttgtcccttcatagcttagtgaagggagattttatactggtacagccaggttctcttgtccagttgatgcatgtgaaccgcataagcttaatgtatatattcttaaatttaaaggaatccgaaactggggcggcctcaatatatgccggcgg

SEQ ID NO: 14673 - DNA, 83 bp, Glycine max
  Clone ID: 701069101H1
ctcttctcacagctcacattcacccaaccaataaacaaaacaaactcccatgccacaagggcaaaacggtaattccacattac

SEQ ID NO: 14674 - DNA, 121 bp, Glycine max
  Clone ID: 701069103H1
ctctgataagaccaacgagtaaataaaaattgaaagatcctgtccaaaaaaagcgatcagagctggtgacgtcgtggtgtcagaatgcttggaatcgttggatgaccaatggagtgatctg

SEQ ID NO: 14675 - DNA, 152 bp, Glycine max
  Clone ID: 701069104H1
aggacaagctcgctgacaagttggagtctgatgaaaaggagaaaattgagactgctgtgaaagaagcactggaatggctggatgacacaagtatggagaagagatatgaggactgagagtgagcgtgaccatatatgggataaacgaggcag

SEQ ID NO: 14676 - DNA, 311 bp, Glycine max
  Clone ID: 701069105H1
catcgagccgaatcggctcgagcaggcgcagacgcaaacgcaaacgactcacgcaaacgcaaaaccagagcgtgatccattgaacaagatggtgcagcgtctcacctaccgcaagcggcacagctatgccaccaagtccaaccaacacagggtcgtcaaaacccctggtgggaagctcgtttatcagactaccaagaagagggccagcggacccaagtgccccgtcactggcaagaggattcaggggattccacacttgaggcctgcagagtacaagaggtcaaggttacccagaaaccgtaggactgtca

SEQ ID NO: 14677 - DNA, 306 bp, Glycine max
  Clone ID: 701069106H1
ctttagccgaggtcaggaggagcactagctaagttcacaatttcaaaatggctaggggactaaagaagcatttgaaaaggctcaatgctcctaagcattggatgcttgacaaactgggtggtgcatttgcgcctaaaccctcatctggaccacacaaatcgagggagtgcctccccctcattcttattctgcgaaaccggctgaagtatgctctgacataccgtgaagtcattgctattctgatgcagcgccatgttcttgttgatggcaaagtcaggactgacaagacttaccctgctggtttca

SEQ ID NO: 14678 - DNA, 117 bp, Glycine max
  unsure at all n locations
  Clone ID: 701069107H1
ccaacacgtatactccaattgcatagtgctgcgatcgccgtttcttctctgaaacaaacacaccgacaccaatcactctctttgatccattccgtntagacgattagcccctacgat

SEQ ID NO: 14679 - DNA, 246 bp, Glycine max
  Clone ID: 701069109H1
cgccaaacgacagcgttctgagtcttttcttcttcgttaccctcttcacatgccttctctctgctaattcccacgatgaccatattttcctaccgagtcaactccatgacgatgactcagtgagttgcatgctaccgacgcaaccttaactacagccggtgatcgaatctgacccacccgggacggtgctctggcggctcagcaacgcaccggggttcttacatcgcgcctcctacgttaatccgt

SEQ ID NO: 14680 - DNA, 146 bp, Glycine max
  Clone ID: 701069110H1
cctgactcacccaaacaaaaaaacaaacgcacgcttctcattctctctctactcgttcagaagatgtttctcacacaggactgagtatgaccgaggagtcaacaccttttctcccgaaggccgtttgtttcaggttgagtatgcaa

SEQ ID NO: 14681 - DNA, 239 bp, Glycine max
  unsure at all n locations
  Clone ID: 701069111H1
cgccgaggtcaggaggagcactagctaagttcacaatttcaaaatggctaggggactanagaagcatttgaaaaggctcaatgctcctaagcattggatgcttgacaaactgggtggtgcatttgcgcctaaaccctcatctggaccacacaaatcgagggcctgctcccctcattcttatctgccattcggctgagtatgctctgacatacgtgaagtcatgctattctgatgcagcg

SEQ ID NO: 14682 - DNA, 180 bp, Glycine max
  Clone ID: 701069112H1
attcattcgttcatcatggttcggttcagcaacaacgtgatcggactcctgaacttcctgaccttcctcctctccatcccgatcctggtggccggagtgtcgctgagcaagcaggcgccaccgagtgcgaggtggctgagagcgtgatcgatcgcgctctcatgtcgctatgcggctgcg

SEQ ID NO: 14683 - DNA, 308 bp, Glycine max
  Clone ID: 701069113H1
gtctgcttcttccgattccggcacgcccccatcaccatggtgaacgttccgaaaacaaagaagacatactgcaagagtaaggcgtgcaggaagcacaccctgcacaaggttacccaatacaagaacgggtaaagatagcaattgctgcccaaggaaaacgccgttacgatcgcaaacaatctggttatggcggacaaactaagcccgtcttccacaagaaggctaagaccaccaagaagattgttctgaggttgcaatgccagggttgcaagcatgtctcccaacacgctattaagaggtgcaacact

SEQ ID NO: 14684 - DNA, 300 bp, Glycine max
  unsure at all n locations
  Clone ID: 701069114H1
cttgtcttctgcttttcaatanacgaataagaagccttcacaccgcttcgttgtgctgtgcttgcttctcttttattctttctattagtattcgtttcgttttctccgtcgtttccgtagctcggcttcagcagcaccagacccaggtgtctataatctgactacacatgtgctgttattgccttccaattgggtgaagtctgattgaagagcaatgcagaaggatactagtaccaccgccccatcaaccacaagtggtcgggttaggcaccgaaaacgctcaaatgaggttattccgga

SEQ ID NO: 14685 - DNA, 278 bp, Glycine max
  Clone ID: 701069115H1
cattactagaaagttagaaaacatggcagcggtggccggagcatcctcgtccgtgattaaggtggctgcactttccggatctttaaggaaaggctcttacaacagagccctcattcgttctgctattgagctaagccaaggtaaagtgaaggcttcaaatcgagtacgtgaaattccgcttgcccctttcacaacgatcttaggtaatcggactacccccacaattgaagttttcgcaagaagatttcgcactgatagtatctcttggcttccctgag

SEQ ID NO: 14686 - DNA, 165 bp, Glycine max
  Clone ID: 701069117H1
ctgattgccacaaggaggatcgtgcgaccgccaaagaaaggctctgctgttcagcgacccgaacccgcatttgaccgtgtccatgatgcatgtggagatgtgtgatctgcagagatgtggcaacggcagatatagatgatgtcaaatatgagttctgaccagagg

SEQ ID NO: 14687 - DNA, 305 bp, Glycine max
  unsure at all n locations
  Clone ID: 701069118H1
ctattcttcaatatcttagggttccgacagattccccatcaattcaaccacttgccgtgttagttgatccattcttataaaaagatcaaagactcattatatatagccanaggcttctgggtcgtcgtgaatctatcttgtgtttgagagattaagacaaaactttttgctttgcaaatggctgctgcaactgctgcaactgcttcttggatgcgattcaaaggcggcaaggaaaggaagctaaccaggatgaataaatccaggattaattgctcttattcttcttcttcttctgtgatagatcc

SEQ ID NO: 14688 - DNA, 308 bp, Glycine max
  Clone ID: 701069119H1
gtttattcggtctactggcattaagctagaagctgttgattcgagaaacgcagcatcaacttacaacatactgaatgaagaaggtcgaattgtggctgctgcacttcttccacacgggagtttcttcatgaagcttggacttgtattcttagtagccaacaattgccccaaagaggttcacctcaatgccacaaaattttttagcccaagtccttgggacatgctttgattttccatttagaaagttttgacatagtaataggacaatgtgaattaaactcaagtgagtcctttgacgtctgctgaag

SEQ ID NO: 14689 - DNA, 282 bp, Glycine max
  Clone ID: 701069120H1
atttttgaaacagagaaacaaaaaaaaaaaaaaaacctcttccaaagtagaggcagagaatctgaaagctagggtttgggatcccgaagaacaagggaaagggaggaaagacccggaagcccggtaaaaacggggcggacgccgaaaaccggaaccgggtatccagggaggccggacaggattacccgaaggtcccccgaatccccgaaaacggtcgctgcaaacgatgtgcatcgagggcacaaagcgccttggcaatacccggggaaagttccacaaaaa

SEQ ID NO: 14690 - DNA, 301 bp, Glycine max
  unsure at all n locations
  Clone ID: 701069121H1
ggcagaagcangaagcagcattaacagaggagcaagatggtctctcaatggaacgacggctctcgtcaacggcggcacccgtgggatcgggcacgccatagtgagtgacttggccgcgtntggcgctgctgtgcacacttgctccaggacgcaaacagagctcaacaaatgcttacaagagtggcagagtctgggctttcaggtaactgggtcggtgtgtgacgtgtcctcaccatcccagagagagaagctcattgaggaagtcacttccatcttgaatggcaagcttaacatctatgtg

SEQ ID NO: 14691 - DNA, 70 bp, Glycine max
  Clone ID: 701069122H1
tgcatatcttcaatgaaaacctgagtgtcaccaactccatctttcagtttcatcttccacacaacatacg

SEQ ID NO: 14692 - DNA, 244 bp, Glycine max
  Clone ID: 701069123H1
aattttctcacattccctttttgccctttctatctctctcgtctttctcccacaatgaacgatcttctaacggaatcatttgaaattccacgtggccaaggtcacggaggtggtggtgacattgagttaggagaatatgcaaggattcaaggagacctgggttggatagttccttcaagaaggtccaaaagcttgttaaccattatgctaagctggataaccttttgaaaaacttccaggatgc

SEQ ID NO: 14693 - DNA, 131 bp, Glycine max
  unsure at all n locations
  Clone ID: 701069124H1
cggctcgagaaaaacttggacaggattctaattaatttctttattattttccaaattccaatcaaaacctnagtcagacagttgtgcaggacatgaaatcaataggtcatgatgatagataaatgacagat

SEQ ID NO: 14694 - DNA, 241 bp, Glycine max
  Clone ID: 701069126H1
gtttcgttcgtcaccatgacttttaagcgcaggaatggaggtcgcaacaaacacggccgtggccacgtcaagttcattcgatgctccaactgcggcaaatgctgtcctaaggacaaggctatcaagagggtttctggtgaggaacattgttgaaaaggctgcagtcagagatgttcaggaggcttgtgtcaatgaccattacacgcttcggaagcttaaggtgaaatgccataatggggtt

SEQ ID NO: 14695 - DNA, 130 bp, Glycine max
  Clone ID: 701069127H1
aatttgttggtggattaggtcactcggagtgcctttgtcatgattttatcttttttcttttttcgagtacataacatatattggttgtatactgctccgtagaataaataagatcatattaatacctgtt

SEQ ID NO: 14696 - DNA, 286 bp, Glycine max
  unsure at all n locations
  Clone ID: 701069128H1
tcaccgtcgaggtcttccccattcaatcaaagcacaaaaatggaggtgactgttttcactcctgcactggaaggaattaagcttgtaaaatcagagcaaggagaaattttgacncagtctttcttggatgcttgcaagcatatacttcctgttatagataagtttggagctgctatggcccttgttaaatctgacattggtggtaacatatcgagattggaatctaagtactcctccaatccaaccaaattcaactactggtacagtttggtacaagttgaggttg

SEQ ID NO: 14697 - DNA, 303 bp, Glycine max
  Clone ID: 701069129H1
ctctcactctcttcgcacctcaacggttctctgcaaaagcaccaatctccatcaagctccatgcttccacctcccatatcttctcttccaagtccttcttcaaaaccggaagactctgcttccagttatggtccaatttgcaaaaggtaacaccaacagagcaaacacttgagcctatccaaccaacagacaacgcaaagaagctctacgtagttaacttgtcttggtctctgacggcggcagacatcactgacctctttgcccaatgcggaaccgtaactgacgtcgagataataaagagca

SEQ ID NO: 14698 - DNA, 317 bp, Glycine max
  unsure at all n locations
  Clone ID: 701069130H1
cggaatcggtcgagaaagaaaaggaaccctagctggataggtcaaacatcatcatgtcggacgaagagcaccatttcgagtccaaggcagacgccggtgcctccanaacctaccctcagcaagccggtaccattcgcaagaacggctacatcgtcatcaaagggacgcccctgcaaggttgtggaagttccgaccttcaaaactggaaagcacggtcacgccaagtgccactttgttggaattgatattttcactgccaagaaacttgaggatattgtgccctcttctcacaactgtgatgttcctcatgtgaatcg

SEQ ID NO: 14699 - DNA, 138 bp, Glycine max
  Clone ID: 701069131H1
cttcttgtcaggaagatatcttgacgagaatacaatcttgaaaacaagagtcaacaagatgttgtaattattaagagtctctggcaatgccactgcgtcgacgtgttaagcattatcatataggttcataattctcac

SEQ ID NO: 14700 - DNA, 129 bp, Glycine max
  Clone ID: 701069132H1
gcacagtaccgtaacgtaacgtaaccacgagatgcctctattctagcacttggaacccaaatccgtgccaatcctcgctcctttcgcagagaagcaattcgacgtcaaagttgcagcagactaagtcac

SEQ ID NO: 14701 - DNA, 299 bp, Glycine max
  Clone ID: 701069134H1
catcgagccgattcggctcgaggcccttgttcctccaaaattctatctggtgttgcagatggacttgattactgcttggatcactgaccttttcacttgtatgggtggttgttttggatgctgtaatgaacccacaccatttattgctgtggatgaacctccaaagggattaagaattcaggggcagacagtaagaaaaccacacatatcagatggtttctggagttcaagcacttgtgatctggataacagcaacattcaatctcagagaagtatctcgtctgtcagtacattaaatc

SEQ ID NO: 14702 - DNA, 300 bp, Glycine max
  Clone ID: 701069135H1
ggatccacatcttatcactccaaatgcactttcatacaaatcagcaatgagagagaatctgttgaggcagggatacagaattgttggaatcattggagaccaatggagcgatctgcttggagaccacagaggcgaagcaggacctttaagcttcctaatcccatgtactacattgagtagtaccttaacctctctcaacaatctagctagagtttgctcctatctatatgtaataaggtatgctgatatgcactattcaaataggagcattagctatgtttgttaatgtcactttatgtt

SEQ ID NO: 14703 - DNA, 300 bp, Glycine max
  Clone ID: 701069136H1
tgagaaggtaacagatagaagctttgggttgagaaatttcaggtacattgagaccatcaaagaagctttggaaagagaatgccctggagttgtttcatgtgctgatatcctcgttctctctgccagagatggcattgtttcgctaggaggtccccatatccctcttaagactggaagaagggatggtagaaggagcagagctgatgtggttgagcagttcctcccagaccacaatgagtccatttctgcagttcttgacaagtttggtgccatgggaattgacacccctggcgtcgttgc

SEQ ID NO: 14704 - DNA, 293 bp, Glycine max
  Clone ID: 701069137H1
ttcatgaggaagcaacctatgacgaccaagagcctaaagacattccccaacgctctttttggtctgaaaggtggacgaggtggtcgtgtaacttgcatggcctcgtacaaggtgaagctcataaccccagaaggagaagtggagtttgaatgcccagatgatgttttcattgttgacaaggctgaggaagaaggcattgaacttccctactcgtgcagggctggttcttgcgtttcatgtgttgggaaattgtgaaggtgacgtggaccatcagatggtagttccttgatgat

SEQ ID NO: 14705 - DNA, 273 bp, Glycine max
  unsure at all n locations
  Clone ID: 701069138H1
cggctcgagacanaccattttattttatttttgaatcaagggtgagggccttccatggcttccgcttgtgcttcctctgcaattacagctggtgccatctctacgccgagttccgggcagaagaatggatcaggaggttgttctcttagtggaaggaaattgagggtgaaaaaggagagagcagcaattggaggacgatcgatgggcactacagtgtgcgcagttgctgagcctgacagacctctatggttccaggaagacncgctctcatgg

SEQ ID NO: 14706 - DNA, 147 bp, Glycine max
  Clone ID: 701069139H1
cattcacaaggtcaaacgactttggaaaggaacaacgtgaacttcaatgggcacatgcacaaagaacattacatggattacaaccagctgacaccaagttcaatgagcgtacacatgtcagtgaactcaatcaaatggccgaagaag

SEQ ID NO: 14707 - DNA, 138 bp, Glycine max
  Clone ID: 701069140H1
ggatttgatcgaagaggagagtgatggatttctcttcggtgagagctgcgttggattcgaagtcgtacgacaaggttgcagatgtgtgcgacaacttgatgcttcaggtcgcagctgacggcattgcttatcaggacg

SEQ ID NO: 14708 - DNA, 153 bp, Glycine max
  Clone ID: 701069141H1
cggatcggtcgagctgtatctgtttgcagtaaacagaaagcttattgtactatttggaacttatattgacagatatcaacagtgattcacgggaagagtgtgcttcagcaacaagcacatctgagacaagtcagtacgtgagcatcaggtgtc

SEQ ID NO: 14709 - DNA, 275 bp, Glycine max
  Clone ID: 701069143H1
gcacacagaaaaaaaaaaagagagagaagatgacgcggggaaagcagaagatcgaagcgcagaagcgaaacgcagagaggaatcagaagggaaagggctctcagctcgaggccagagccgttggcctcaaagtcatctgcccatctgaaaggcccacttgcaattcaaaaccaatttgtggaccataaggcttcaaaaaatccgagggggaaaccccttgaagagaccagtaagtaatatttggggcaattggtacaaaaggtccccaaggaaaa

SEQ ID NO: 14710 - DNA, 291 bp, Glycine max
  Clone ID: 701069144H1
gtgaatcccgatcaaccactgcagaaatttttgacttttgtgagcacatacgccgggcggaatctgatatggtgcttccaaggaccccagttgtctgcaaaccctttgatgatgcatttggaaatgctttcaagttagcagatattgaccctcaaagagcattgttttttgatgacagcatccgcaatttattgacagccaaacgcttgggcctccacacagttgcgattggtacatctgttcgtaccactggagtggatcatgcattagagagtattcataatatcaagg

SEQ ID NO: 14711 - DNA, 300 bp, Glycine max
  Clone ID: 701069146H1
tttttctctctcccttagtcaaagggattcatcgttcttcttcccaggttatttagaaaagcaaaatggtgaagatttgctgcattggtgctggatatgtggggggtctactatggcagtcattgcacttaagtgcccatccattgaagtcgctgttgttgatatctctaaatcccgcattgcagcctggaacagcgaccagcttcctatctatgaacctggccttgatggtgttgtgaagcaatgccgtggcaagaacctcttcttcagcactgatgttgaaaagcatgtctttgaggc

SEQ ID NO: 14712 - DNA, 306 bp, Glycine max
  Clone ID: 701069147H1
cttggcaatggaaaccttcattgttttttccttctcttggccttcaacacaaaacccctcctagcagcagaaccagagccagtggttgataagcaagggaaccctttggagccaggagtagggtactacgtgtggccactttggggctgatgaaaggaggcctaacattaaggccaaccaaggaccaggccatgccctcttaaggtaatcggtgacccttcattcattggaaccccagtttcattcttagcacaaggccttgaccatgttccaacactacatgatctaaccattgatttccctgtg

SEQ ID NO: 14713 - DNA, 300 bp, Glycine max
  Clone ID: 701069148H1
atcgtaagcagcggctaccctaatcctctcctcttcctctctactaattacagctatggccgacgaagctgtggttgttccagatcccacccagatcgatgtcaagctctttaaccgctggaggttcgacgatattgagattactgaaattccctgggtgattatatcggaatggcgacatccaagaacgccaggtatgtgcttaaaacggcgggaaggaatccggtgaaccggttcaggaaggcgcaatgccccatggttgaaaggctgacaaattctctcatgatgcacggtagaaac

SEQ ID NO: 14714 - DNA, 97 bp, Glycine max
  Clone ID: 701069149H1
ctcgagccgaataaagttctattggcgatgtattttgaaaaataagttggcgataaaataaacgttgcatccattctaaataatttaaatagtttgg

SEQ ID NO: 14715 - DNA, 114 bp, Glycine max
  Clone ID: 701069154H1
cgacgaagcagcttccgcagatcgccattctgggagctggtatctttgtgaaactcagtacttcggcatctcggtcttcactttcattgaatccttgagcgatcagatcagtaa

SEQ ID NO: 14716 - DNA, 189 bp, Glycine max
  Clone ID: 701069158H1
caattttctagggttttattcattttccgatggcttctgcagatgttgagtaccgttgctttgtcggtgggctcgcttggggcactgacgaccatgccctcgagagagacttctctcagtacggcgaaatcgttgaaacgaggattatcaaagatcgtgggactggcagtccaaggggttttggatttg

SEQ ID NO: 14717 - DNA, 265 bp, Glycine max
  Clone ID: 701069160H1
gtttgccttgtgccgtttgtgttgttttcgggacgaagaagaagatggtgtcaggttctggaatctgcgccaagcaggtcgtggtggacgcgcgccaccacatgctgggtcgtctagcctccatcgtggcgaaggagcttttgaacggccaagaaagtggtggtcgttcgcttgtgaagagatttgcatctcgggcgggctggtaaggcagaagatgaaatacttgaggttcctccgcaaacgcatgaccaccaaaccctcccat

SEQ ID NO: 14718 - DNA, 193 bp, Glycine max
  Clone ID: 701069163H1
cggcagagcaagaacacaacacaagacatcgaagcagaagaagacatggggttgcagtggctgattctccctacgtggtcgagcgaagctgcggtggcattctgctacccttccagccaactcctgagaccgtttgcttctcgttccccatctcacccggtttcatgtacctgcaggtcactctaattatatg

SEQ ID NO: 14719 - DNA, 132 bp, Glycine max
  unsure at all n locations
  Clone ID: 701069164H1
ggatcgagagtaacgtacaaaccagtttttctgtctgcactcttactacattancttacattacatacacacacaaacttcacttctgtcagaagagctaagacaatgtgtgagtttaaggcacacacattg

SEQ ID NO: 14720 - DNA, 161 bp, Glycine max
  Clone ID: 701069165H1
agcatttgaagttcaaaaacttgtatcatacttaccagtctttcttgacatttctcttcccatgtttcaacacatacaacaatgggttttcgtcttcctggtttcagaaaggcgtccttttcttcaaaccaagcatcttctaaaagtgaagatgtcccaaa

SEQ ID NO: 14721 - DNA, 302 bp, Glycine max
  Clone ID: 701069166H1
gttacgctttgcgagtgagaattgataaacaaatcgttagggttttacggttgtgcgagtgagagtgagagagaacaatggaagacataacagagggagtgaacaacatcaacatctctgatttcgtataagaaaaatcgcattcaggtctctaacaccaagaagcccctcttctcctacgttaatcctggccaagagatatatgcaacagcatgatgaggtcgagctctcagctctaggaatggctattgccacagtagtaactgttgctgaaattttgaaaaacaacagacttgctgttg

SEQ ID NO: 14722 - DNA, 300 bp, Glycine max
  Clone ID: 701069167H1
ctaaattaaaccctagctagaggagagggtttaaagctctgaagcttctttcttcttctccaattaagatcgcagagagagatggggagtgacagcgaggcacagaagtgagagaagaagatgcttgcgctcgctcccattgctaaaccccttgccggaaagaagctttgcaagcgaaccctaaaacttgttcgtagagctgccgaacacaaatgcctgaaaagaggagtgaacgaggttgttaaaagcataaggagaggtcataaaggattgtgtgtgattgctgggaacatatcgccg

SEQ ID NO: 14723 - DNA, 180 bp, Glycine max
  Clone ID: 701069168H1
cgcgagtgtcgcccttttttttttttttttggggaaaaaccataggcgaggcaagccgagatatgttacttgaaatgttaaatgaggttcagtaaaatacctagaaagagatggaatttggttaaaaaacccggttcccctaaaaacaaatttcaaaatccttgagggaaccttttgaaa

SEQ ID NO: 14724 - DNA, 300 bp, Glycine max
  Clone ID: 701069169H1
gttgcaggaaaaatggtttcgctgaaactgcagaagcggctcgccgcgagcgtgctcaagtgtggcagaggaaaggtttggcttgaccccaatgaagtcaacgaaatctccatggccaattctcgccaaaacataaggaagctggttaaggatgggtttatcatcaggaagcccaccaagattcactctcgctcacgtgctcgtcgaatgaaggaagccaagaggaaaggacgtcactctggatacggtaagcgtaagggtacaagggaggcaaggcttcccactaaaattctatggatg

SEQ ID NO: 14725 - DNA, 261 bp, Glycine max
  Clone ID: 701069170H1
ttttcagagtagaaccttcactctgctctcacccttattcctctctttcctttctttcttcttaaataaaaatcatgtttgggtccttgggattcttctttgtgggtcttacgttgttgttgttggtcggggtggctaatgctgtggccaacacttccaacaaatttgatcaactcttcaaaccaagctgggcttctgacaacttcattcatgaaggggatctcctcaacttcaaattagacaatttttcgggggctggtt

SEQ ID NO: 14726 - DNA, 167 bp, Glycine max
  Clone ID: 701069171H1
caactcttctctctctctctccctacacagcctaagcttaagcttatccctccccacttgttccctctgccgaatgttatagccaaaagggtgcgagagagagagagagagacacagaaaccacaaacaaccatcaagggacagttagtgagagagagagagagaga

SEQ ID NO: 14727 - DNA, 206 bp, Glycine max
  Clone ID: 701069172H1
ggctactatatatggtcattttcagatagctttgaatgggatgctggttacacagctcgatttggcatcatatatgtggattacaagaacaatttgagtagataccctaagtcctctgcgttttggctgaaaaaattcctttctcaagtggttcaaaatctattggtccctttggcatgcatgcccggttttcctcctggttggtt

SEQ ID NO: 14728 - DNA, 291 bp, Glycine max
  Clone ID: 701069173H1
cgctcggtgcaccggtctgtttcaatcgtgcctcctgcatactatgctcaccttgctgcattccgcgcaaggttttacatggaaccagagacgtcggatagtggctctatgacaagtggtgctgttgcaggccgtgggatgggcggtgtagggcgtacacgcgtgtacctgtgacaatggacctgtgagacaattgcctgcactcaaggagaacgtcaagagagttaggtttaatggtaaggacatgaaggccaagattactgtaaaacctggtttagtgaatcctttttg

SEQ ID NO: 14729 - DNA, 213 bp, Glycine max
  unsure at all n locations
  Clone ID: 701069174H1
canaacagtctccatttgactacaaaacagtctccatttgacacagtcctagtggtgtactacttattctggccacaccagcatccatcactaatgtcatgtggagttcttcattccccgcatggtgaaactctggcttacaatccattcctgccgggcagggtaagtgatatcagagattgtgatcaggatgggtattgaacaggcggatat

SEQ ID NO: 14730 - DNA, 123 bp, Glycine max
  Clone ID: 701069175H1
cacaacacagatcatgggagtggatttaaggcaagtagtggcgggtgtgctcaccctcacaatgttcgtcatgcttattcacatgatcagaagggaccattttgatgctggtcatgataaact

SEQ ID NO: 14731 - DNA, 235 bp, Glycine max
  Clone ID: 701069176H1
tagtaagtcggaatcggtcgaggcttgttgagtcgtgttttgcaagagggtatggcgaaggacgttgaggttgctgagcgtggctccttctctgggaaggactaccaggaccctccaccagcaccactcattcgatgctgaggagttcacaaagtggtccttttaaagggctcttattgctgagttcattgccactttgctcttcctctacattactgtggcaccagtaataggg

SEQ ID NO: 14732 - DNA, 288 bp, Glycine max
  Clone ID: 701069177H1
gtgcctcatttttctttcagttttcctgcttcttctcttcttcaactggttttgagattgccattttcttatcttgtttagtttagcttgtttggttgagaggaattaattattttgtaataaacaatgaaggagagtgtaggaaaccctttgcgtcttcaatctgtgaatcatatctccctcatatgcagatcagtggaacaatcaatggatttctatcagaacgttcttggatttaaccccatcaggaggcttggctcttaagattttgatggggcatggcaattc

SEQ ID NO: 14733 - DNA, 194 bp, Glycine max
  Clone ID: 701069178H1
gagttttgagatttgactcacgagaggagagtaatgtgtgggaagtagaagtagaagtagaaggagagaagcattactacgtcagcgattcctttgcctttttctttaattttagactcgaagacaatgcttgatctaattttgagaatcgcattaagagggaaagcgaatcagagcttgtgaaattcccgttg

SEQ ID NO: 14734 - DNA, 284 bp, Glycine max
  Clone ID: 701069179H1
ctcgaagcgaggtcgcggaggatcggcgggaaacaagttccgcatgtcgctgggtctgccggtggcggcgacggtgaactgcgccgacaacaccggcgcgaagaacctctacatcatatcagtgaaagggatcagggtaggcttgaaccggttgcctcagcttgggtcggagacatggttatggcaaccgtcaggaagggaaagcccgacctcggtaagaaggtgctgcccgccgtcatcgtccgcaagcgcaaccttggcgccgaaaggacggtgttaacatg

SEQ ID NO: 14735 - DNA, 203 bp, Glycine max
  Clone ID: 701069180H1
cgttgctctgcttcaaccttgcggaagaagaagacgccgcagccatggtgaagtactccagagaacccgacaatcccaccaagtcctgcaaggccagaggcgctgaccttagagtgcattccagaacactaggagactgccttgccatcggaattgccccgtaaacctaaggtactggaggagtttggcccaaacggccacct

SEQ ID NO: 14736 - DNA, 313 bp, Glycine max
  Clone ID: 701069181H1
caagaagtgaaggtgttgagtgttttcttcttgtttggatctgagagagaagagcgagcgatgacggtctttcatttcttcaactgcgccattctcaccttcggcccccacgccgtctactaattctggcacgccccttatctcgcgtaccgatacaattcggaaacccctatccaaagccgccggttggtctatcctggcaacggcattaagtggaagccttatttggtctagctacttttccccaaggttccggagagtggatagctttgatccgtatcaggagtttttgaaggcattaataggctttata

SEQ ID NO: 14737 - DNA, 293 bp, Glycine max
  unsure at all n locations
  Clone ID: 701069182H1
gagagagcgagtgagtgtggcgttccggagaatatggaatggcagcggtgagtgagagtgaggtggtgcactctgtttggggatttgggaagttccatgacaagttcaatccattcctttcgcatgcatttctctaaaccttagagcactctgcttccgatgtcagggaaactggatgcatacaacaccacatcgtaaccnaacgcancaacacnaccattctcgccgttgtcccactctatgttaattcccattcctacggctaatgcttaccattcttatggatacaacta

SEQ ID NO: 14738 - DNA, 302 bp, Glycine max
  unsure at all n locations
  Clone ID: 701069183H1
cgaagaagaagaagaattgaattcgaaaaatcgtagcgtacngttggttgcgcttgacacggtacgatgggaagaggaaaattcaagagcaagcccaccggtcgccgccagttcctccaccccggaagatatgcttgctggaacctcaaaccgtcctcgaacttttagacagaaagaagctgagcatgaagaggagcctgaggaagtatctggggatgaatctggagaagaatcagaagaggaaacttctaagaaaaaaggaacacaaggagttattgagattgaaaatcccaacttggtaa

SEQ ID NO: 14739 - DNA, 296 bp, Glycine max
  Clone ID: 701069184H1
gcaaaatcaaaatgtgggcaagcgccgcagaaggtggtgctccggaggtgactctggaaacttccatgggttctttcacctttgagctgtactacaagcatgcgccgaggacttgtaggaacttcattgaactgtctcgccgaggttactacgacaacgttaaattccataggatcattaaggacttcatagtacaaggtggggatcccactggaacaggaagaggaggagaatccatatatggtgcaaagtttgaagatgagattaaacgagagttgaagcacactggagctgga

SEQ ID NO: 14740 - DNA, 291 bp, Glycine max
  Clone ID: 701069186H1
cagaagagtcgctgcgccgcttgtgctttccccgctgcacgcacgcggaaatataactggagcgtcaaggcaattcgcagaaagaccaccggaactggcaggatgagatacttgcgtaacgtgcctcgccgtttcaagagtggcttcagagaaggtaccgaagctgcaaccaaggcagaagggagaagctacaatggattagactttccaaagacggtcctcgttgggtacggattaccaggattagattgcttttgggccttttgccagtaattttggacacctaatttt

SEQ ID NO: 14741 - DNA, 116 bp, Glycine max
  unsure at all n locations
  Clone ID: 701069187H1
gcttcttcagccactccgcacctcgcagcctccgtgncctcaacaaccatggctgaaatcgaaactaccgttccagatctcacccaaatcgacgtcaaactcttcaatcgctggag

SEQ ID NO: 14742 - DNA, 203 bp, Glycine max
  Clone ID: 701069188H1
cttccgaattcgaagttaatttgcaagatggctaaggaaaaggctcacgatcaacattgtcgcggttggtcatgtggaccctgaggaggcaaccaccattaacgagctgaagaagcctgttgtggagaaagaagctccagtgcatgccatatgagggatgcacgtacggcttcggaggggaccagaaaattatgttaacaaat

SEQ ID NO: 14743 - DNA, 158 bp, Glycine max
  Clone ID: 701069189H1
ctttactgaagaggtaggcagggaagagagagatggcaggagggaggtattgtgagaaggaagtgcttccattcaccgcaatggttgctgttgagtgcaccaacgttggtgtcaacgttctattcaaagcagcaactgagaagggtttaaagtactat

SEQ ID NO: 14744 - DNA, 122 bp, Glycine max
  Clone ID: 701069190H1
catcaacagcaacgatggtgcagaggctcacttatcgcaagcgccatagctatgctaccaaatccaaccagcaccgggttgttaagacccctggtgggaagttggtgtaccagaccactaag

SEQ ID NO: 14745 - DNA, 292 bp, Glycine max
  Clone ID: 701069191H1
attgaattctccagagagaagaagaaacttaatcgatcatcacttcacttcactaatacatcatggcagacgagacccagaacaagtatgagagctctgaggttgaggtccaggatcgtggtgtttttgactttctcggtaagaaaaaggatgaagaagacaagcctcatcctcaggaggaggtcatcgccaccgagtttcaaaaagtcactgtctcagaccaaggagagaacaagcacagcctcttcagaaaagcttcaccgatctgacagcagctctaagctcttcaagt

SEQ ID NO: 14746 - DNA, 228 bp, Glycine max
  unsure at all n locations
  Clone ID: 701069192H1
cgtccgacgtaccangcagctccccancatctagcttagcttttcaactttcaaggtaccttatcctcctcttctgttttcgattaagatttcggttgttagggttttctgctatttttttgttatcgatcatcggatctgtcgagctatttgaattttgatcgggattttttttccgggtctttgatttacccgttcatatatttaggcaacttgggacccgttttg

SEQ ID NO: 14747 - DNA, 292 bp, Glycine max
  Clone ID: 701069193H1
catctgatcccaattccattcattcattcattcgttcttcttctttcaccaacaacaaagaacacagagaaactttcatttcatatattttcatcatcgcagcaaaggaatcaatcaatcaaaaccatggcaggcttcagtggcgacgaaaccgttcctttcttcggcttcctcggtgccgctgcggccctcgtcttctccggtatgggagcggcgtacggaacggcaaagattggggtgggggtggcgtcgatgggcgtgatgaggccggacctggtgatgaagtcgatcg

SEQ ID NO: 14748 - DNA, 245 bp, Glycine max
  unsure at all n locations
  Clone ID: 701069194H1
caaagatttggattgaaccagaaaatggctgagattttgattgatgtatagtgttgcagcgtgaggttgtcaacgtgtcatggatgttctcttgttcaagagggagaagggtaaacttanattccattgtccttcatagctagtganggggatttatactgctcggcagggtctcttgtccagttgatgcatgtgaaccgcataagcttaatgtatatatccttaaatttaaaaaaaaaaacaaa

SEQ ID NO: 14749 - DNA, 72 bp, Glycine max
  Clone ID: 701069195H1
cccagtcgtgttgtcttatcactcctgaatgttgacattatattgcaaaatgaatccatctttctaagagtc

SEQ ID NO: 14750 - DNA, 235 bp, Glycine max
  unsure at all n locations
  Clone ID: 701069196H1
ctgctgtatctgaagagtaccatggggaaatcgtaccgtgtcttttgaggagttgttcttaaattcagtgaatttctgatcgcacctaatatattgtctttcgatagggttgacagaatttttcatcngtctacagtcttgttggatgagtattcttgggtagtattcgtatgtcattgggcattatgttcaagtgctttcgacatcgataatttagcgtgtaagtttagctctc

SEQ ID NO: 14751 - DNA, 293 bp, Glycine max
  Clone ID: 701069201H1
gcaaactgactggaattgaaggaaaaatcaatgcaaggaacagtgatccaagtctgagaaaaccggactgggccagttcagctgccatacactttgctccatcgttcaagtgaggaagggttgactttcaaaggaattcccaacagtatctctatctaattaaaaagagtttgtggtttccttatctatgttgtacttctgaataacatagactttatgcatgtctatgcgtaattattgcctgaacttctgcactattgtatttggatgctctcggttttcatataataaag

SEQ ID NO: 14752 - DNA, 287 bp, Glycine max
  Clone ID: 701069202H1
gccaagtgaaagtgagaaaaaataaaaatcaaagagcataatgtcagggatcattcacaagattggggagacccttcatgtgggagggcacaagaaggaggaggagcataagggtgagcaccatgctggagaatacaaaggggagcaccatggtgaacacagtagtgagtacaaaggagagcatcatggtgaacacaaagctggagagtaccatggcgagcacaagacagagcacaaagaggggttcctagacaaagtcaaggacaagatccatggtgagggcggcg

SEQ ID NO: 14753 - DNA, 289 bp, Glycine max
  Clone ID: 701069204H1
agttgcgtttgtggttcatatgaatcctgccctgtaagtatcatatcatggcaaccttaacttgacaacatattcctacgatcagtttccaaatggaagcgttttacacaactctctcctcccctgcgtccacgtctgttctcaattttcagggctctgaattgcctagaagaaatctttgtaagaactcttcacacactatttttgcatcacctacgctgcctaaaccgtttcttcagatttgtggtagacctcagacattgatttatacgtcaacccgactctcttc

SEQ ID NO: 14754 - DNA, 289 bp, Glycine max
  Clone ID: 701069205H1
cactgccttaagcctttgattcccaaatcctcccttcctctcccattgcacagtgatcgttgcgatccatgacgacaccaccgtcttcctcctcagcttcgcaatcgcagttcgcctattcaaacccctcctcctcctcctcctacttccccgttccctttcaccttcagcaacccgcaaccactcactacgctgcgccctacgtcgccgccccctccgtgcaaatccccgctcctccagtcgtcggccccgttgcgcccgcccctgtacccggcgtatactccgccgt

SEQ ID NO: 14755 - DNA, 283 bp, Glycine max
  Clone ID: 701069207H1
cttttctcagctgctgttcctgcgcgtgaacaagcctcaggtaaaccaaagccatggttaaccataacaatgttatccccaacggacacttccgtaagcactggcagaactatgtgaagacctggttcaatcagccagcacggaagacaagaagacggttggctcgccagaagaaagctgtgaagattttccccagacctacagctggacctcttagacccattgtacatggtcaaactttgaaatacaacatgaaagtgagagctggaaggggattttccct

SEQ ID NO: 14756 - DNA, 285 bp, Glycine max
  Clone ID: 701069208H1
gaaagatgtcgaagcgtggtcgtggtggttcggcggggaacaagttccgcatgtcgctgggtcttccagtggcggcgacggtgaactgcgccgacaacacgggggcgaagaacctctacatcatttcggtgaaagggatcaaaggccgtttgaaccgtcttccctcggcctgcgttggcgacatggtgatggccaccgtgaagaagggaaaacccgatctgaggaagaaggtcttgccagctgtcatcgttcgccagcgcaagccatggcgccgaaaggacggcg

SEQ ID NO: 14757 - DNA, 280 bp, Glycine max
  unsure at all n locations
  Clone ID: 701069209H1
ctggggttctgtttgttttattcaattttatctttttcgttcatagttcaaaaagtttaaacggtcttagatttaggagtattcttctaggaaaatactaaatcccaattcccatttccaacaacaatatgtatcgaactctctcacttttcggngcaggtccccttgttgtgtgtgacgctctcgcttgcatcagaacctactatataaacacagcgcgcgctcgaaaacttcttcaagtcaaaaaaaaaaaaaaccaaaatcactcaataggaagagg

SEQ ID NO: 14758 - DNA, 286 bp, Glycine max
  Clone ID: 701069210H1
gcaaaaagaaagaatcccaggcgaggagaaagatggaggggaaggagcaggatgtgtcgttgggagcgaacaagttccccgagagacagccgattgggacggcggcgcagagccaagacgacggcaaggactaccaggagccggcgccggcgccgctggttgacccgacggagtttacgtcatggtcgttttacagagcagggatagcagagtttgtggccacttttctgtttctctacatcaccgtcttaaccgttatgggagtcgccggggctaagtctaagtg

SEQ ID NO: 14759 - DNA, 282 bp, Glycine max
  Clone ID: 701069211H1
gaagttgtttgttttctttgttgctgcagtagttttggtagcatggccatgccatggcgcaggctaccaaaggttccctctccgaatgaaaactggctatggtgagcgttcttcggaggtaaaatgcgcaagttttaggcttgctgtggaagcacacaacatccgagcctttaaaaccatttctgaagagtgcgttgaaccaacaaaggactacattaatggcgaacaatttagatcagactctaaaacagttcaccaacaagctttcttttatgctagtga

SEQ ID NO: 14760 - DNA, 284 bp, Glycine max
  Clone ID: 701069213H1
ccatcaactagcaaaaaggagtttgtgtaagggaagaagatggtgtcaggttctggaatctgcgcaaagcgagtggtggtggacgctcgccaccacatgttgggtcggctagcgtccatcgtggcgaaagagcttctgaatgggcagaaggttgcggtggtgcgctgcgaagagatttgcatctccggcggtctggtgaggcagaagatgaaatacttgagattcctccgcaaacgcatgaacaccaaaccctcccatggccctatccacttccgcgccccagc

SEQ ID NO: 14761 - DNA, 278 bp, Glycine max
  Clone ID: 701069214H1
accttcacaccctacaatgccaaaagtggtgtcatactaacctcaaccgatctcaacatcaagtcttatgggaaaaccaccacttgtgacaaacccccagtgtggaagctcctcaaggtgctaactggggtgtggtttttgagcactggtggtgttgaagggaatccaggggttaacactgttgtcaattggttcaagattgagaaggctgagaaagactatgtgctttctttctgtccctcgtttgcacagatttgtgcagggaactgggttgtatg

SEQ ID NO: 14762 - DNA, 278 bp, Glycine max
  Clone ID: 701069215H1
ctttgtagtagcaagcgagcatggctccgaagaaggttcttctcctttgcggggacttcatggaagactatgaagccatggttccatttcaggcattgcaagccttcggtctcgccgtcgacgccgtctgtcccggaaagaaatccggcgatgtctgccgcaccgctgtccatgtacttgccggcgaccagacttatagtgagacggttggtcacaatttttcactcaatgcaacgtttgatgaagttgatgctgcaactatgatgggttgtgggtgc

SEQ ID NO: 14763 - DNA, 286 bp, Glycine max
  Clone ID: 701069219H1
ggttcgccagacaatgcttctatcctcctcctgctccgccgccggctccgccgtctccggcgagatcatgctgttcggcgtgagagtcgtagtggactccatgaggaagagcgtgagtatgaacaacctctcgcagtacgagctccctcgcgacgccgacaacgccaaagacgacgtcgctgccggctacgcctccgctgacgatgccgctccgataaactcctgcaagaaccgcgaccgcaagcgacggattccatggacggaggaagagcacagctattcttgg

SEQ ID NO: 14764 - DNA, 285 bp, Glycine max
  Clone ID: 701069220H1
gcgatcgaagtttcacatcagccttatccagtttagggtttcggttccttaccctacctttgacgtatcgaaaccttaaatttgggattaggtctgagcaatctggttggtagaacctttggtcttagagagtcaagttttatgtctggattagacgatcaaattcctactgccttcgatccttttgctgatgcaaatgctgatgactcgggtgctgggtcaaaggagtatgtgcatattcgcgttcagcagcgaaatggtaggaaaagcctgacaaccgttcag

SEQ ID NO: 14765 - DNA, 285 bp, Glycine max
  Clone ID: 701069222H1
gttcttgaaaccctttcttagagtgtttaaagaccttgaatgcacgcaattgtatcctgtaaagatgttaacattgtgcagttttgtgctggtttaatatcttttactttatcaactatattgaagttttgaagagcataattgcaacagttgtcaggtgatataaatgaggaagtggatagtcataaccggatgctggatcgtatgggaaacgatatggatctctcgacaggagtcctctcaggcactatggataaattcaaaatggtatttgagacaaaatcc

SEQ ID NO: 14766 - DNA, 282 bp, Glycine max
  Clone ID: 701069223H1
cggctcgaggcattgcatccctcttgatttgtagtttgttttgtgctttagataaaagttctgacaaatcaagaggggttttaagatcatagtgtgtgttttgcaacaatggctaagttctttgctgctatgatcttggcactctttgccatttgcatacttcaaacagtggtaatggctgctaatgaacaaggaggccacttgtatgacaacaagagcaaatatggaagtggaagtgtcaagagttaccaatgcccatcacaatgctcgaggagatgtagc

SEQ ID NO: 14767 - DNA, 94 bp, Glycine max
  Clone ID: 701069225H1
tcggctcagagtgcattggggtcattccttgtacattggttggggtctacatggctccgtccacatttcatcagcaattgcaaggggcttgaat

SEQ ID NO: 14768 - DNA, 257 bp, Glycine max
  Clone ID: 701069226H1
cagcacgcagaggagcagaagcctaagccttcaacatggcgagacggttgaagaaacacttgaagaggctcaatgctccaaaacactggatgcttgacaagcttggtggggcctttgcaccgaagccatcatctggaccccacaagtccagggagtgtcttcctttgatcctcatcctacggaacaggctaaagtatgctctaacatatagagaagttattgccatcttgatgcagcgccatgttcttgttgatggc

SEQ ID NO: 14769 - DNA, 281 bp, Glycine max
  Clone ID: 701069227H1
ctcactccctcttctctcacaatgccatctgtggccagtttacagaacagttagttaatgatgtcatcttttgttcgttcttcatggcctgcatggctctcttctccgctcccagttcctaggccaagacaccctcactcatctctaccctcgtaacaaggcttccaccattcataacaagccaacaacagcacaaccacgtgccaaatttgacatgctgcaagtcttgggaggaagaggactatgcaatggagaagcaggtcttaaacaagagctgaaga

SEQ ID NO: 14770 - DNA, 280 bp, Glycine max
  Clone ID: 701069228H1
gataactagaaacagtgtgatgaaaatgaaggtccttgttttcttcgttgctacaattttggtagcatggcaatgccatgcgtacgatatgttccctctccgaatgaacactggctatggtgcccgtactccggaggtgaaatgcgcaagttggaggcttgctgtggaagcaactaacatctttggctttgagaccattccactagagtgcgttgaagcaacaaaggaatacatccatggcgaacaatatagatcagactccaaaacagttaaccaacaa

SEQ ID NO: 14771 - DNA, 189 bp, Glycine max
  Clone ID: 701069229H1
gtgatatggaaattgggaactcgtgttatgtaaagatgtggtgtggtctggctagtgtagagcgtttggctgactcgtgtatgtacattctctccggaggcactctcgagagcttttctctctggtaggtccgtgttgctgaaacctttttgacctttccaataaagcatttgtttcaccctatcaatg

SEQ ID NO: 14772 - DNA, 281 bp, Glycine max
  Clone ID: 701069230H1
cattaatttgccttcatctttctctatcttaaccttcaccttgcaaagtgtaccaaacctcaaatggatcatcaaaacaaacacgtagcagtctttgctttcccctttggcagccaccttatgcctctcttaaaccttgtcctcaaactagctcattcccttccattttgttcattctcattcattggcacagacaaatccaatgcaatccttttcccaaaaccccacatcccaaataacatcaaggcctatagcataagctatggaatcccagatggtca

SEQ ID NO: 14773 - DNA, 282 bp, Glycine max
  Clone ID: 701069231H1
atgaaacagaagagagtcgaaaacggcagtcccctccctcatcggaagggaggaacacagccagccacgacaggtttagtccctggaatcgggttctgtcttcttcattgcagcagatctcactacactgcatgcatatggcgtactgtggttgtcttggaccctttaaaaagcccccactaattgctactgcagatgttccgccaaaaggattgaggaaacaaggtaaggcagcaaagaaacctagcacatcagaagatttctggatgcacagcacgcatg

SEQ ID NO: 14774 - DNA, 286 bp, Glycine max
  Clone ID: 701069233H1
ctaccatggcttcgagactcacggtaacagccttggtgctgatagctttggcaacagttttctctccaaacctacgcttcatcagtgggtaaattcatcgaactaaccatcacttcccacaagatcgtcattttttccaagacctattgcccgtactgtagaagggcaaaagctgttttcaaagagttgaaccaagttccacatgttgttgagctcgacgagagataggatggttcaaagattcaggatatcatgattaatattgttgggaggcgtactgtgccac

SEQ ID NO: 14775 - DNA, 284 bp, Glycine max
  Clone ID: 701069234H1
ggtcaagtgatcaaaggttgggaccagggattattgggaatgtgtcttggtgagaagcgtaagttgaaaataccatcaaaacttggctatggagagcagggttccccacccactattccaggtggtgctacactcatatttgacgctgagcttgtgggagtgaacgacaaaagtttaggcgaaggaaaaggaaacaacgaactgtagacaaatcaaaacaaatggatagtcgagcttttgctatcttagcttatttttgttcctcaataatatgcttttatgac

SEQ ID NO: 14776 - DNA, 285 bp, Glycine max
  Clone ID: 701069235H1
ctttctctcttctctctccccgcccaaaccctaactccctaccctattccgctttctctcatccatccatgaaaggaggaaagtccaagaccgaatctaagagagccgatgccaaacttgctgtgaataagaagggcgccgccaccaagactaggaaacccgccggaaaggggaaggcagcgaaagatcctaacaagccaaagaggcctccaagtgctttcttcgttttcatggaggaattcaggcaggtgttcaacaaggaacatcccgacaacaaagcagtgt

SEQ ID NO: 14777 - DNA, 286 bp, Glycine max
  Clone ID: 701069236H1
atcaaaataaaatatgaccaaaacattacttctatggatttttttattgatcagcatcctcatgttttcaactactgggagcacatttactacaaaaattgaagatcttgggacttccaggcaacaaaaggaaaccaaaaccatgtacggtgtgatcatggaatcaagcaaaccaaacactcaaagaagaacaaatctaggattgcatgttgttcaacacacaaaggtgtcacagaaagcaaagacaaatggtggagggaataacgtaaaggatcataacgggaac

SEQ ID NO: 14778 - DNA, 283 bp, Glycine max
  Clone ID: 701069237H1
attaattgcaagaatggcacttcgttgcttggtgatgtccctttctgttctcttcactcttggtcttgcgagagaaagccatgccagagacgaagatttttggcatgctgtttggccaaacactcccattccaagttcattgcgagatcttctaaagcctggccctgcaagtgttgaaatcgacgatcaccctatgcaaattgatgaaacacagtagccgaaaaccttcttctataaagaagacgctcatccaggcaaaacaatgaaagtacaactcagcaag

SEQ ID NO: 14779 - DNA, 282 bp, Glycine max
  Clone ID: 701069238H1
gaaaaaatgggttcttcttcttctatgtggacggtgtgtgtgattttggcatcactggcctctgcagcactctgtgccaacccacgcaggccagtggatgtacaatttggccgaaactacgtgcccacatgggcctttgatcacatcaaatatttcaatggtggttctgacattcagcttcatcttgacaagtacactggtactggcttccagtccaaagggtcttacttgtttggtcacttcagcatgtacataaagatggttcctggagattctgctggc

SEQ ID NO: 14780 - DNA, 280 bp, Glycine max
  Clone ID: 701069239H1
gttcgagataactagaaacagtgtgatgaaaatgaaggtccttgttttcttcgttggtcaaatcttcgtagcatggcaatgccatgcgtacgatatgttccctctccgaatgaacactggctatggtgcccgtactccggaggtgaaatgcgcaagttggaggcttgctgtggaagcacacaacaactttggctttgagaccattcctgaagagcgtgttgaagcaacaaaggaatacatccatggcgaacaatatagatcagactcccaaacagttaac

SEQ ID NO: 14781 - DNA, 284 bp, Glycine max
  Clone ID: 701069240H1
gcattcactttctcctacctcgtccttctaacccaacctcaacctgtttctccgagaatcacatccaacgcttctgtcatggaggaagttaacgttgtggaaactaaggatggaactgtctcagtagctgctgcgtttgctggtcatcaggaagccgtgcaggatagagaccacaaatttttaagaaaagctgttgaagaagcatataaaggggtagattgcaaagatggaggcccttttggtgctgttatagttcataatgatgaaatagttgctagttgtca

SEQ ID NO: 14782 - DNA, 285 bp, Glycine max
  unsure at all n locations
  Clone ID: 701069241H1
actcgagccgattcggctcgaggatcaatggcgaagaaggaagagactgagatatggananagctccttcctctaattcgagtgtacaaggatggtcgcgtggagcgtcttccctgaagatccccaaactggcgtctcatccaaagacatagtgatcgcagacaacccctacgcctccgctcgcattttccttcccaaatcccaccacactaacaacaaactccccatcttcctctacttccacggtggcgccttttgcgtcgaatccgccttctcctttttcgt

SEQ ID NO: 14783 - DNA, 280 bp, Glycine max
  Clone ID: 701069243H1
gtctccacgatacagagattcagtaagaacaataactccagggttgcccatttttctgtacaactactccactcaccaactccatggtatctttgaggctgcaagttttggaggatccaatattgatccaacggcttgggaggacaagaagtgccctggtgaatctcgtttccctggtcaggttcaagtgattactaggcaagtttgtgagccactagaggaagattcctttagaccaattcttcaccattatgatggccctaagttccgtcttgaactg

SEQ ID NO: 14784 - DNA, 279 bp, Glycine max
  Clone ID: 701069244H1
aaaagaaccctcaattttccgggaaaaccctccccacaatggtttcccgggaaaacaccaattggctcttcgattacggcttgatcgacgatattcctgttccggacgccaccttcggcgtcaattcctccgccttcacatggccccctaacgccttgaacgcttcctccaatgtcggcgttgaaattgatggctcgttgggggattctgacagtctcaaagagtctggctcaaagaaaagggttaggtctgagtcatgtgctgcttctggctccaagg

SEQ ID NO: 14785 - DNA, 52 bp, Glycine max
  Clone ID: 701069246H1
cttcgtagacagaggagtgaatatcagggttatacaatgctgaggcggaccc

SEQ ID NO: 14786 - DNA, 278 bp, Glycine max
  Clone ID: 701069247H1
gagagagagagagaaatggcttgcaggcaattgtgggcttcaagagctgactcttacctgaggatctctgtgtttcacagacgcttttctaatgttattaaagatttcaagtatgttgattctcatgagtgggtgaaagttgatggaaattacgcaaccatcggcataactgatcatgcgcaagatcatttgggtgatgttgtccatgtcgaattgccagaagtaggagcagctgtgacacaaggaggtagttttggtgcagttgacagtgtgaaggc

SEQ ID NO: 14787 - DNA, 289 bp, Glycine max
  Clone ID: 701069249H1
gtcaaaacagaacaaaaaagagtcaagcggcgagcaatggcgacatcgctggtgcgatcggggttttcttcgtagcgccctacgaggaagagctcgtagctctcaggttcccaagcgaaactttgcttcctctggtcatcacgatgatgcatatgagacggacaaatgggagaagattacatatttaggcattgttggttgcaccggttactccgtttataatctatcaaaggctcacccgcacttcaaagaacctcctgcatacccatatttgcatatccgcaataag

SEQ ID NO: 14788 - DNA, 284 bp, Glycine max
  Clone ID: 701069250H1
gtcaagtgctaagtgacttaatgtaccgagctatctactcattttatctagttttctcttaaggtctgtactaagttccttgaaactttgacctggtattacgattttaatggtgagacgtgtgctactgctacatcataattcccatcaaatttaattatcgatgggttagaatttcattaatttatgattttggtcgtgctagattcccggaagtctcttttgaagaatttttgggtgtgtactagaaatattttaatttggcttcatggttttattgataa

SEQ ID NO: 14789 - DNA, 285 bp, Glycine max
  Clone ID: 701069251H1
gcaccagtttcaccgcacgaatatcttgttgtttggagcgatccgagaaaaactctgtaaacatgttggtttaccaggacctccttacaggtgatgagcttctctctgactccttccgttacaaggaaattgagaatggaatgctgtgggaagttgaggggaagtgggttgttaaaggagcagttgatactagacattggtgcaaacccttctgctgagggtggaggagaagatgagggagttgatgatgcagctgttaaggttgttgacattgttgacacattc

SEQ ID NO: 14790 - DNA, 213 bp, Glycine max
  Clone ID: 701069252H1
tgatggcacaaattcaagcctagacaagaggattttcggatgtgctataccttgattcagacacctactcaaaatctcgagcaggtctcttcttgtacacatttttattgccaacggcaaatgcatctcaacacctgctactaattgcaatattctttccggatttatccgaaaaagtgtcattgacattgctcgcgatcatggctatcaggt

SEQ ID NO: 14791 - DNA, 282 bp, Glycine max
  Clone ID: 701069253H1
tttctcagccgcctcggctagggttcggaaacgaagaagggttctgttttcttttcgcgatgaggggcaagtggaagaagaagcgtatgaggaggctgaagaggaagcgccgaaagatgagacagagatccaagtagtgcgttaaacctagtttgtttccgttgctttcacaattgcttatgttgtcaaataggacacccagttgttagtggcactggtctctcctttttgatgtcttgatacattttgttggattttatttcgtcttatgttcttagctga

SEQ ID NO: 14792 - DNA, 281 bp, Glycine max
  Clone ID: 701069254H1
cctaaaaggactcaggactatttagtctcctttggagaatgcatgtctacaaggatctttgcatgaacatcttaataaaataggtgtcaaggctcgccaatatgatgcatttgagattggttttataacaactgacgacttcacaaatgcggacattttggaagccacttatccagctgttgcaaagagcttgcatggtgattagctctccgctcctgcaattgcaattgttactggctccttggaaaggcccggaactcatgtgcagtgccaacactggg

SEQ ID NO: 14793 - DNA, 294 bp, Glycine max
  Clone ID: 701069255H1
cacacacactgtgtttgtgaaactccctctcacacacaagtcacattgacaacttagtgttggtccacatggaatcacgcaactaacaccttttgaagagatgagctcgatcatcgtgcatccccacgcatcaggcaatctgcgatttcttcgaagatgtggaacgccattctttgagccttggccatctcatagttgtgcaagatggtgctccttcaaagaccatcagggtccctgaaggctttgactgtgagctctacaaccggaatgacatcatcaggatcgttgggccca

SEQ ID NO: 14794 - DNA, 283 bp, Glycine max
  Clone ID: 701069256H1
caagaatttccattgcatgctaagcaaatacgcattatattactagttttaatttgttttgtcgtttgcttctttctttgattaatgatgactagctttaaggttgcatgtgtggttgcgatgatgtgcatggttgtcgccatgagtgttacacccatggcacaggccgcaatcacgtgcgggcaggtcgccggcgacgtgtctccgtgcctcagttatcttcgaagcggcggaaaaccgtcggacgcctgctgcaacggagtgaagtcgctcagcggcgcgg

SEQ ID NO: 14795 - DNA, 284 bp, Glycine max
  Clone ID: 701069258H1
cattcattggcttgtgtggctttctccctccaaaaaactcccctcttttccgtcggagaatggcgtcatcttcacaaagccgctgtggcagcggcagcgccgcctccacgactgagcgaacgcagcttccaccttctgctccgactcacagcctctccttgccgatatccgaaaaaccgtgcctatgatgaaggacatcgcagttcaattggagaaagacaacctccctgacacggcgaaggaactggaagatgcggttattgagttagtagggctatctgagc

SEQ ID NO: 14796 - DNA, 280 bp, Glycine max
  Clone ID: 701069259H1
cttctcttctcttctctcatagggttagggtttttttctcttcatcgctctctctgtcgttttatttccatggctcagcaagatgctcagaatggtgcgtcggagaatgccgctgctgcggtgtcgtttgtcgctttgaagccgcagctcctcatcgaagctcccaaagcgaacgacgccgttctgttctacaaggccgcgtttgccgctgaggaggttggccgtacgctcaaccctaagcgtaaagcggagcacgagcttcctctcatactctccgcag

SEQ ID NO: 14797 - DNA, 280 bp, Glycine max
  Clone ID: 701069260H1
gtgcatagcatattccagtgtttttcatttcatcgtgcattcaatggccaccacagcagctctatccggaaccatggtgagcacctccttcatgaggaggcaacctatgaccaccacaagcctaaagacattccccaacgttggtgaagctctttttggtctgaaaagtggacgaggtggtcgtgtcacttgcatggcctcgtacaaggtgaagctcataaccccagaaggagaagtggagtttgaatgcccagatgatgttttcattgttgacaaggca

SEQ ID NO: 14798 - DNA, 258 bp, Glycine max
  Clone ID: 701069261H1
ctagagccggttcgtgaaccgcgtggtttcgtcaatgtttatcactgttgcaaccaacaagatcgcacttcttgggtttgcattcaagacggacactggtgacacaagggagacactagccattgatgtgtgcaaggatatcggcgacaaggcgcctaagatatatgatccacagtcactgagcccaattcagaggatttatgacgacaagtttgtctggacacctattcattgcagccaactagtctacaactgaga

SEQ ID NO: 14799 - DNA, 227 bp, Glycine max
  Clone ID: 701069263H1
atatcactgcaattcaaggtttgaacttcccatggcgagcgctgttgatgcttcaggaaaccgattcccaacttctgcggtgttgatggcgtcgtcgaagcacattgggataaggtgccactccgagaatttggagtttctgaagtgcaagaagaaggatcagaaccccgaaaagtgcctcgataagggtcgtgatgttacccgttgtgtccttggccttctgaagg

SEQ ID NO: 14800 - DNA, 282 bp, Glycine max
  Clone ID: 701069264H1
gagaaaaccctaattcgctcgcagtcacccaagaggcgaatccttaccattgctcgagatgggtgaagaagtgaaggccgtggttccagagtctgttttgaagaagcagaagagacacgaggaatgggcgttggccaagaagcaagacctcgaggctgcgaagaagaagagagccgagagccgcaaactcatctacaacagagctaagcagtacgctaaggagtacgatcaccaggagaacgaattgattcggttgaaacgcgaggccaagctgaaaggtgg

SEQ ID NO: 14801 - DNA, 285 bp, Glycine max
  Clone ID: 701069265H1
gggtttctccaccaagagggaaatggctcccaaaccgcctagtacgggtctgtttgttggactgaacaagggacatgtcgtcaccaagaaggaattgcccccacgcccctcggatcgtaaggggaaaacaagcaagagggtgcactttgtgaggaacctcataagacaggttgctggttttgcaccctatgaaaagcgtataactgagttgctgaaggttgggaaggataagagggcacttaaggttgcaaagagaaagcttggaacccacaaacgtgcaaagaa

SEQ ID NO: 14802 - DNA, 97 bp, Glycine max
  Clone ID: 701069267H1
cttggtgatctgtatgaatgaaataaatacgtgatttaaggagacactatatccgtttccccatatccatttctgatacgtgtaattgaattgatgc

SEQ ID NO: 14803 - DNA, 275 bp, Glycine max
  Clone ID: 701069269H1
ctgccatcaaggctgctgggaaagcatggtatcacactatggtgtcatattctgattatacagaattcgacaacttttctaagtggttgggtgtttcacagtaaacttcatgatttattttttcgtattagaattttgttttttatgctcatcagaactaaatatccttatctatcggtttttttgttttgcgggttaaggttgtcatcataattatgcagacaatgtggaaattttgtttgttggattttagtgcaaattctggttcttatatt

SEQ ID NO: 14804 - DNA, 278 bp, Glycine max
  Clone ID: 701069270H1
gggcttttgttcactggtatgttggtgagggtatggaagaaggggagttttctgaggctcgtgaggaccttgctgctcttgagaaggactatgaggaggttggagctgaaggagcggaagatgatgaggaaggagaggactattgataatcgaaggcttttttttgttatcaatgtaattgtttccgagttaaaagggtacatgcttcgttacattaccctgaaccattattgttcgttcttttttgtttttgctcctgctgtgtgatatagttctcc

SEQ ID NO: 14805 - DNA, 278 bp, Glycine max
  Clone ID: 701069271H1
gaaaggatttggtttaggggagaagaaagaaaagaaatggggaaaaggaagtgatttggtttggaaaatcaaatggaatcagctacgaatttgagggttagggatttcatagcaaaggaagttgctgattgggacgacgaattgattgcagttgctcgattcaaagccttttccggtcaaagatgcgattgggaacccaccttccgcttctggaaacacttcatcatcaaaatcgccacccattttggcctcctcctcattcgaccctcccaggtcaa

SEQ ID NO: 14806 - DNA, 278 bp, Glycine max
  unsure at all n locations
  Clone ID: 701069272H1
ctgaaagaaacagtcagacatcagaatcagaagaagcgagcaaagatgtcgggtcgtggtnagggaggcaagggtttgggtaagggaggagccaagaggcacaggaaggtgctccgcgataacatccagggaatcacaaaacccgccattcgccgtttggctcgcagaggcggcgtcaagagaatcagtggcctcatctatgaagaaacccgcggcgtccttaagatcttcctcgagaacgttattcgcgacgctgttacctacaccgagcatgctag

SEQ ID NO: 14807 - DNA, 247 bp, Glycine max
  Clone ID: 701069276H1
cagcctacgtactgcaaaagcttatgccacaaggacaatcctgttcttgaaagatgatggtgatttgaagccacttgctattgaattaagcaaaccacatccagctggagataatttgggtcctgagactatagtggtgttgcctgcaactgaaggtgttgatagtacaatttggctattggccaggctcatgttatgtgaatgactcggttatcatcgctcggagcatggtaatgcctgcgtgatg

SEQ ID NO: 14808 - DNA, 278 bp, Glycine max
  Clone ID: 701069277H1
cctcgagccgaatcggctcgagggaagaggaaccctagctagggtttctaagaagctgatccgactagatggtgcagcgtctcacctaccgcaaacgccacagctatgctaccaaatccaaccagcacagagtcgacaagactcccggtggcaagcttgtttatcagaccacgaagaagagggccagcggacccaagtgccctgtcactggaaagaggattcaagggattccacatttaaggccagcagagtataatagatcaaggttacacagaaac

SEQ ID NO: 14809 - DNA, 278 bp, Glycine max
  Clone ID: 701069278H1
ggcttctgaacagtttctgacaccgaaattcagccacaaagttgaccatcttgggatggatgagaatatcatcatgttccaccatttccccacattgatacaacaaggagattccaacaattgaaaactccttatcatctttctcttgcaacatcgtttcgcggttcctttgccgtgatttcaattgttgcataagaaaacatcactcactacttctttcctctcctttttcattcaatttctctgattgacacaattgccgcccagatcagtgattg

SEQ ID NO: 14810 - DNA, 276 bp, Glycine max
  Clone ID: 701069279H1
cttctatggacaaagacatccaatgctgcagcgtggtgcaaaacttctgtgttagtgacttgcttctattaggaagagcaaccattgaagagtcacgtggccttttacactggatgtactctgaggcaggttttagcaagatggggatttgtggacttagtatgggaggagtacatgctgcaatggttggatcacttcacccaacgcctgttgcaaccttcccttttctgtccccacattctgctgctgtggcattccgtgaggggattttgaagt

SEQ ID NO: 14811 - DNA, 67 bp, Glycine max
  Clone ID: 701069280H1
ctgaacttctgcactattgtatttggatgctctcggttttcatatagtaaagtgtgttctcactttc

SEQ ID NO: 14812 - DNA, 264 bp, Glycine max
  Clone ID: 701069281H1
cctatctggggtttgcttccttttgtgtatgtgtgtgtcggtgattactccttcttcttcttagatctgaatagtttcagggtctaaaaaaaaaaactacatcctttgcagtttgcccataagctgagggattatgaattttccttgcgttttggaaacaaagcttctttttgttataattattattatttttttccagattccgtaggttgcggctgtgtgaaaagggtaccagattccttgcaaatgcttcttgattaaatg

SEQ ID NO: 14813 - DNA, 277 bp, Glycine max
  Clone ID: 701069283H1
cgaagaagatgcacgatttgtggcggtttgtgtcccgattgttaacccaagtaaggatccgaagctacggaaggtagcttgtgaaagattgcttctttgcgttgcggagaaggatttggtgagggacaggggtttgttctataaggagttgcttgagaagaatgggtgttctggtgttgcggagtggtggagacgaaggatgaggaccatgttttccatttgcttctatgctttatttctgtttgacaagaatgggtgcccttctatggttcgaaca

SEQ ID NO: 14814 - DNA, 174 bp, Glycine max
  Clone ID: 701069284H1
gcaaccaaggtcttaaatttgtggagtacttgtgtttgttttcaatagtttctctcaagtattatgaattttgtttttaggtgaacgggttttatgaacaattttctatcttttctagttattttactgaacttcatttaacatttcaagtaacatatctcggcttgcctcgcc

SEQ ID NO: 14815 - DNA, 276 bp, Glycine max
  Clone ID: 701069285H1
cctcgagccgaatcggctcgaggttttcttcagaaaatttgccatcgctgagggaagcgcgacactcttcgttgttcaagatgactgctaagtggaagaagaagcgcatgaggaggttgaagaggaagcgccgaaagatgagacaaagatctaagtaggtgcttgaacaaggagtggagatgatgtgcttttccatctgctaccagcttcatgacattttatgctgtcatggctcttatgatgatcttgaggtctagtcgcgaggggagcttccat

SEQ ID NO: 14816 - DNA, 280 bp, Glycine max
  Clone ID: 701069287H1
tttgattctgggcattgcaactgtgacatcaaaattgatggatcgctatccaaaattggttactacagaaaacgaagagggattgacacctttgcaaatgctgcttgctcgatgttcacttgtacgtcgagatattgtaagttcgttgtttaagggtatggaagaagagaaagagcctctcaactctgaacaattgtcaaaagtagtgttcgatgcagcaaaatcaggaaacattatgattttagaatgtcttttgaaatatcatccagatttgctattt

SEQ ID NO: 14817 - DNA, 278 bp, Glycine max
  Clone ID: 701069288H1
gcacggccaagatattagggacagtttgttgcgtggctggagccttaaccatggcattggtcaaaggacagaagctgttacacacggagttccttccttctatacatctcaccggcagtcaaggtgatgattggctgctgggttgcctattgctcttagcaagcagtgttttttggtcatgttggatgatcctgcaggtaccaatcacttcgtgctgcccagaccatttattatcaaccttttggatgtgtctgttttcaacaatacaggctgcccta

SEQ ID NO: 14818 - DNA, 279 bp, Glycine max
  Clone ID: 701069289H1
ccgttttcctttgctttgcgttctacaatgtcgaaaacctcagagattattacatgcaaagctgctatttgctggggaataggaaaacctgtgactgtggaagagatacaagtatgaccctcccaaagccaccgaagttcgagtttagatgctttgtgccagtatatgctccacagacatctctagcccaaaaggattcccacataccaattttcctatagcacttggacacgaaggagttggtattatagagagtgtcggtgatcaagtaacgaatct

SEQ ID NO: 14819 - DNA, 161 bp, Glycine max
  Clone ID: 701069290H1
attgtgttagccaagaaatgaagaaatcaaagcattgaatgaagctgcgatgggcaactcgtatgataaaaagcgtgacactcaattttccagaaacgttgttgccccgagagttccctctccgaaaaacaagaccttgtcgccgtcaccgtcgctagaac

SEQ ID NO: 14820 - DNA, 264 bp, Glycine max
  unsure at all n locations
  Clone ID: 701069292H1
ctggtctgcaactatgagcaaggattatctaatcatactttctctccttctttccacggtgcttgcaatcccanattcttcttcttcttcttcctccgtctatcttgggaagggcttctcccctcgcaaattgtctcccagttatcacattcacaaaaccattgacgactcctatgcagttatcttcgatgctggtacgacgactagccgtgtacatagtccatcgctttcaccaccaattagatctcctccggattggccaag

SEQ ID NO: 14821 - DNA, 193 bp, Glycine max
  Clone ID: 701069293H1
cttctgatacctatactaaccactaattcattcgttctttcttctcttcaccgaacgacattagttagacagtagaacctgtacatttcatatattttcatcatcgcaacaaaggcatcaatcaatcaagaaccatggcaggctacagtggcgacgagaccgcacctttgatcggcttactcggtgcagatgc

SEQ ID NO: 14822 - DNA, 279 bp, Glycine max
  Clone ID: 701069296H1
aaagtagacttgaagaattactctgcgtatgccgaactatcttctgcgctggagaacatgttcagctgttttaccataggttcttgtggatctcatggaaatctgggaggggaggtgctgaatgaaaccaagctgaaggatctgcttcatggatcagaatatgttcttacgtacaaggataaagatggcgactggatgctagtgggtgatgttccctgggagatgtttattgagacatgcaagaggctaaggatcatgaagagctccgaagccattggt

SEQ ID NO: 14823 - DNA, 292 bp, Glycine max
  Clone ID: 701069301H1
acaaaataaggatgttgcacctgccctagcatggtgtgctgataacaaatcaaggctgaagaagtctaagagcaaattggagttccaagtgagaacttcagaggtcatagcattaagaagaagcggggaccaattgagaagcaatcacatatgctaggaaatatcttgcgccatggggagccacccacatgaaagaattgcagcgagtcattgcaacactagcttttaaaagggatactgaatgtgccacatacaaggttttatttgaagctaagcaatgggattatctagt

SEQ ID NO: 14824 - DNA, 289 bp, Glycine max
  Clone ID: 701069302H1
caccaaggtaggttaaacactcttcttcatcgtcgtcgcaatgggacgtgtgatccgtgcgcacgtaagggagcaggctcggtcttcaagtcccaaacggaacaaccgaaagggccttgccggtttcggaagcttgaattccgaaaagcgcaacggctacctgaagggtgtcgtcactgacgtcatccacgatcctggccgtggcgcgcctctcgctaaggtcgccttccgccacccgttccgctacaagaagcagaacgagctcttcatcgccgccgagggtctctac

SEQ ID NO: 14825 - DNA, 73 bp, Glycine max
  Clone ID: 701069304H1
agacaaaattatgttgacatcactagttaatattgattttcaatagaatcggtgttaacaaaaatacggtggt

SEQ ID NO: 14826 - DNA, 247 bp, Glycine max
  Clone ID: 701069305H1
ctctcatctttctctcttctctctccacccaaaccctaactcccgaccctgttcccctctcgtatccgtcatgaaaggaggaaagtccaagaccgaatctaagagagccgatcccaaacttgctgtgaataagaagggaagcgccaccaaggctaggaaaaccgccgggaaaggggaaggcaggaaagaaccttaacaacccaaaaaggctccaaagtgccttctcgttttcctggaaggagttcag

SEQ ID NO: 14827 - DNA, 244 bp, Glycine max
  Clone ID: 701069306H1
cagctacaaaggatgatcttactgtttatgcagctttgccaactgctccatcagatgaatatggaaatgtttccaggtggtacaagcacattgatgctttgttgagaatctctggtgttactggcgatggctctggtgttattgttgaggggactctagttgcagagcctgttgcaactccccctgctgcagacacacaggctgctggtgctgaaggagcacgatgatgatgatgtggattgtt

SEQ ID NO: 14828 - DNA, 209 bp, Glycine max
  Clone ID: 701069307H1
cggctcgatgcagtgagtttctctgagatcattaaagattccattttggaggcccctgcgatgaattttctcccaaatgtgcgttctggtagctaggccgagattggaccgcgcgtttctatggatgatgaacacatttgtattgatgatctgggagctcatcttggatttgtgttcaaagtgttcgaataccagtgcatttcatgcag

SEQ ID NO: 14829 - DNA, 115 bp, Glycine max
  Clone ID: 701069308H1
ggctcgaggcaaacataacttgcagtaatggcttcaatgaataaccaaaaagaaattgagctctttgagggccaatctcttctgtacatgcagctatatgggcacctaagaccta

SEQ ID NO: 14830 - DNA, 256 bp, Glycine max
  Clone ID: 701069309H1
ctcttttcttcttctcgtcgttgcttcggtgttgaatcatggatccgaaagtcgatttcagtgctccgcattccatgggaaccactatcatcggcgttacttacaacggcggtgtcgttctcggagccgactctcgaaccagcactggagtgtatgttgccaaccgagcatcggacaacatcacacagctcactgataatgttgacgtgtctccgtctggatcggctgctgattctcagattgtctctgactatgt

SEQ ID NO: 14831 - DNA, 276 bp, Glycine max
  Clone ID: 701069310H1
tctcagtttctcattttcccaatcgcagctaaaaaatcctttgagccctttaacctattctcaataagcagaaattagggaacgcaacaatggctcaagcggttgaacaatggtataagcagatgcctgtcatcacgcgctcttatctcaccgctgctgttgtcaccatcatcggatgttcccttgatataatttctccgtatcatttgtcacttgaacctagattggtggtgaagcaatatcagttttggcgtctggttactaatttcttgtact

SEQ ID NO: 14832 - DNA, 110 bp, Glycine max
  Clone ID: 701069311H1
atctgacgctttttcagcggaggcaacataactgcgcacgtctgggaaccctattttggtgcacatctcaagaatcagagttttctttaccactatcaggtttcggatta

SEQ ID NO: 14833 - DNA, 286 bp, Glycine max
  Clone ID: 701069312H1
ggctcgagattgcaacaccgcgatatgaacgatgcaaaatagtttcagatacgtcgcgttgattgattgatatgaagtggttgactttctggaactgcatatctatcctcgtgttgtcttttgctttcttcttcttctattgtcacacatacacatctactccttccctcatggctgagcaatcttccaagtccatttacgatttcacagtcaaggacatcagtggaaatgatgtgagtctgaataattacagcgggaaggttctactgattgtgaatgtcgcctc

SEQ ID NO: 14834 - DNA, 273 bp, Glycine max
  Clone ID: 701069313H1
ggttttagaggaactcaatgagataagaagaaacggggatgaaatagtcgtcagggaagggccaaagacaattattggtggatgtatagatagggagggttccagtgatatgcctagtgctttcctttgccccatacttcaggaggcaatgacaaacccacacgtggcagcagatggattttcttatgagctagaagcaatagaacactggctgcagtcggggcgtgacacatcaccaatgacaaatttgaggctgaagcacacattcctcac

SEQ ID NO: 14835 - DNA, 280 bp, Glycine max
  Clone ID: 701069314H1
gagaaaaaagatgagcgacggaggaaaacgacaaggtggaagagcgttgccgccgccgccaagaggccctccgcctcctcccccctctcgccctcgcctcgaacccgtcgatcgcgaaaagacatgtccgttactgctgcgagtgttcactaagattgggagtcaccattccatggaagactttgccgtcagaggcaaagatcccaaagacgaggttcagatttacacctggaaggacgctactctccgagaactcaccgatcttgtcaaagaagttgct

SEQ ID NO: 14836 - DNA, 268 bp, Glycine max
  Clone ID: 701069315H1
gaccacagtccacaagactcagaagcaccaccgcgaccggcgaatccagccaccgtgtgcggcttcgaattgagtccgagaacgcagttagacaggctttatattgaaacttgagacttgaagggaagctgttataattggtcagtcttcccatggcgtatcccttctcagatttcaagtactcagatggcctcactgtagtgggtatctccttctgcacagctattgtctgtgaggctatctcatgggttcttatctatcggaccaa

SEQ ID NO: 14837 - DNA, 261 bp, Glycine max
  Clone ID: 701069316H1
cttcggcattatcgatcttcaacttcacaatggtgcgtgtcaaagacgctctcgttatcaccccttccgagcccacaccgaataccgttctctcactctcagctcttgactcccaactcttcttgcgcttcaccatcgagtctctttctatttacatccccggcccgggccttgacccaacttccaccgcggctcgtttatgccgtgcattagcccaagcgcttgttccttattatccattcgccggcaaggttcgctcca

SEQ ID NO: 14838 - DNA, 83 bp, Glycine max
  Clone ID: 701069318H1
cgtcgtggtcgtgtcgcagcaaaaccaagccatccactaacttgttctgtccaagacatggctctgatcctgcatgctaccag

SEQ ID NO: 14839 - DNA, 109 bp, Glycine max
  Clone ID: 701069319H1
caaaaagaagtctgatcctgtccagtcattatgagaagcttcagcagtctacgcagaggagaacatagacaagtaccagctcaaaatctctcagggagatcactagatg

SEQ ID NO: 14840 - DNA, 133 bp, Glycine max
  Clone ID: 701069320H1
gtgagctataagctagtttatcgtgaggcgaatatgaagttgtttgtactctctgttgctgcagtagttttggtagcatggccatgccatggcgcaggctaccaaaggtttcctctccgaatgcacactggct

SEQ ID NO: 14841 - DNA, 278 bp, Glycine max
  Clone ID: 701069322H1
cgaaagagaaagagagagagagagagagatggcgtcgggctggggaattaccggaaacaaaggtcgctgctacgatttctggatggatttcagcgagtgcatgtctcgctgccgtgagcccaaggactgtgcttttctccgcgaagactacctcgagtgcctccaccattccaaagagtttcaacgacgaaaaccggatttacaaggaggagcagcgcaaactaagggctgctaccaggaaaggccaggaggttggggttattgaacttcatctttag

SEQ ID NO: 14842 - DNA, 212 bp, Glycine max
  Clone ID: 701069323H1
caaattagagggtgtaacatgcaacaaagcagaaggggcaatgtacctgttcccccaaattcgcctgtccgaaaaggctatcaaagctgcagaggctgcaaatgcaacacctgataacttctattgcaaacgcttgcttaatgccacaggagtcgttgttgttcctggttctggttttggacaggttcctggcacatgggcattttaggtgc

SEQ ID NO: 14843 - DNA, 279 bp, Glycine max
  Clone ID: 701069324H1
caagttcaaagatgaagatgatccacgttcttttcctctttgctcttgtctcgttcacttcccatgcttctgtcaatgatttctgtgtagcagacctaaaaggtccagatcgcccttcaggctatcagtgcaagccacctaacacagtcacagtggatgactttgtgttctctggctttgtagctggaaacaccacaaacactttcaatgctgcattaacctccgcatttgtaattgattttccagtgtgaatggtcttggtgtatctgtggcacggtt

SEQ ID NO: 14844 - DNA, 275 bp, Glycine max
  Clone ID: 701069325H1
ctgggggctggggtgattgaggaggttcgagttcagagggataaacgttttggatttatcagatacaacactcatgacgaagctgctctggccattcagatggctaatggaagacttgtacgtgggaagaatatgaagtgttcgtggggtagtaaaccaactccacctggaacagcttcaaacccactacctcctcctgctcaaccatatcaaatacttcgcactgcagggatgaaccaatggtattctcctgctgagttgttggcttatcagcg

SEQ ID NO: 14845 - DNA, 273 bp, Glycine max
  Clone ID: 701069326H1
cgcgaaggatcatggtggggttcagaaacagatacatggttatggaggtttttctgaaccctaatagggacaaaggtggggatgattctgttatagttacacagtttaatgtctccaaagctgtaagagacagcatactggtgaattttggggagtgtggtttggcttcgtcattgggatcgtttcaggggaacagtatcagacagtatggtccgccattacaatggtcacaaatattggaaactgcccggtcatgtttaacttgctggattt

SEQ ID NO: 14846 - DNA, 275 bp, Glycine max
  unsure at all n locations
  Clone ID: 701069327H1
ggaagaagagaagattttcatcagttgagttgagagaaggaaagggaaaatgggtaaggatctgagtccggaacaagtgtcttccatgaaggaagccttctctctattcgacactgacggagacggtcggatcgctccgtcggagctggggatcctgatgaggtctctgggaggtaacccgacgcaggcccaactcacagccatcgtggctgaagagaacctcacggcccccttcgacttcccccgattcctcgatctaatggccanacacatta

SEQ ID NO: 14847 - DNA, 273 bp, Glycine max
  Clone ID: 701069329H1
cactcactagcttcttctctgttctcaccaatggcatcaacaatatcagcaatggccatgatcaacgccaaatgcctcaacccaaagttccccaatcccaccaagctcgcaccatcaaaaccctcccttcagatcaaccttccaaagggcctcatagcctcacccgaaagcactaaactttcccccgcgacagcaatcgcaggagcaatattcacaaccctcggaacctgcgacgccgcattcgctgttcaacagatagccgacatagcagaa

SEQ ID NO: 14848 - DNA, 267 bp, Glycine max
  Clone ID: 701069331H1
caagtcctaaccccctctgtcaatttcaacggcgaactccctcattcctccgatgccatctccgttcgacgctctatctgattagcggatagcgaaaatcctaagcaaaatattataccgtggtctttagcgtgacccatcttcatagatctaaaccctatgcaactgcactattctcgtgttcgctttaaatcagaccgctcattctcctcaatcatacctccatctctctctctttctctttctgatcacaatgtcgacctttgg

SEQ ID NO: 14849 - DNA, 238 bp, Glycine max
  Clone ID: 701069332H1
gcactatggcagctattgtttatactctcctgataaaaagaggaagttgaagttgggttgctgcaacaatggaacctgctactaataacaatccttctccttctgctcatgcttcattacatgaaaccaaatatattgagagggtgaaacatgccctgatcgactttggagtcccagaagagctaaggttgtctgatcgtagcatctacacagttccttgctatctccgaaaggtgaa

SEQ ID NO: 14850 - DNA, 88 bp, Glycine max
  Clone ID: 701069333H1
attgcttcatcattatggctgtgaaccttgggaacttggcgttgctactggacctgacttcgccgcggaggtggattctggagaggaa

SEQ ID NO: 14851 - DNA, 94 bp, Glycine max
  Clone ID: 701069335H1
tcaacagccatgaaaaccacactcttctcactctctcccttattcctgttcctactcttctcactagtcgaaggactcacccccaaatgtgaca

SEQ ID NO: 14852 - DNA, 206 bp, Glycine max
  Clone ID: 701069337H1
gcttcctcggtgccgctgcggccctcgtcttctcctgtatgggagcggcgtatggcacggcgaagagtgcggtgggggtggcgtcgatgggagtgatgaggccggagctggtgatgaagtcgatcgtgccggtcgttatggcgggagtgttggggatttacggggtgattattgcgtttattatcagcaatggggataaacccaaa

SEQ ID NO: 14853 - DNA, 160 bp, Glycine max
  Clone ID: 701069338H1
gttgttgtaactcgttcttcttcttttgttgttctgtgtttgtgtttgttttttctctcacctgaaaatgtcttgctgcggtggtaactgtggttgcggaagctcctgcaagtgcggcaaaggctgcggaggctgcaagatgttaccagacttgaagtac

SEQ ID NO: 14854 - DNA, 236 bp, Glycine max
  Clone ID: 701069339H1
gctgaaacacgccacactcttcttaccatgggcctcctcgatcacttgtcggatgacaccgtcggcggtcctcggccggagaaccggcttggcaagcttccgaaagaccacaccttcgctttccgatcctgcctccggcaaagcatcagacagcggaaacgttgaaatcgtacggtgaagatttgccggaggatgcggtgagagtgacgcgaagtatcctgatcgtgaaaccacct

SEQ ID NO: 14855 - DNA, 273 bp, Glycine max
  Clone ID: 701069340H1
ttctattctggttgacgcttctctcaccatccccatttcgctttggtgcaaagcatccttcgtttcaatttctctctctcagcactttctgcaatcgaacctttcatctccaaagggatccacaggctcgaagcgatatggggctgacattcacaaagcttttcagtcggcttttcgcgaagaaggaaatgcgaattctgatggttggtcttgatgctgctggtaagaccactatccagtacaagctcaagctcggagagatcgttaccacaa

SEQ ID NO: 14856 - DNA, 242 bp, Glycine max
  Clone ID: 701069341H1
tctttaccaagcaactattaagcaaggggacttcctattgaatcggatccagaaattgtcacgtgtgatagatctttaggtcattttttgcattttagactaaaagtttattggaaaggcagagataacgacaatttcacggtattttactacgagggtgaggcacggcatttctgtagtccatttgatgtgcaaatatgattaattaaatttgccaaatccacatatatcaatcagttttc

SEQ ID NO: 14857 - DNA, 270 bp, Glycine max
  Clone ID: 701069343H1
ctaacgcgtgcatagcagagtcagagacagagacgcagccatacggcggagacctgcgaggtgttataggcaaattaagaacaagccataccccaagtcacgtttctgccgtggtgttcctgatcccaagatcaggatttatgatgttggtatgaagaagaagggtgttgatgagtttcctttctgtgtccatctggttagttgggagaaggaaaatgtttcaagtgaggccctggaagctgctcgcattgcttgcaacaagtacatggc

SEQ ID NO: 14858 - DNA, 259 bp, Glycine max
  Clone ID: 701069345H1
actaaatgctactgctaagcttgtaatcttcaaagacaagagtatgcttacttactgcttagtatacagttaagctagtcataagtggtgattcattcttgtctatacttcatagggatgctcattttgttgttgttttggttcattcactttattggcatgcaaaaatcatgtaaccttcctatgtcttgtttagtgacggacgataatactcattccttggttggttgcgagaatgattattccttgtaaatggaat

SEQ ID NO: 14859 - DNA, 187 bp, Glycine max
  Clone ID: 701069346H1
cgcttatggtggatacctatgcacccagagacgatgaagggcgtagtaagccacgaaatgcttcggggagttgaaaataagcgtagatccggggattcccgatataggtcaacctttcgaactgctgctgaatccacgggcaggcaagagacaacctggtgaactgtaacatcttagtagccagagg

SEQ ID NO: 14860 - DNA, 269 bp, Glycine max
  Clone ID: 701069349H1
aaaaactaatcactacgaaaacaagagatatcgaagatggctctgcccaaagctaaggagatcgtgtcgtccaattccgtcgtcgtttttcagcaaaactaatgcccttctgcgtcgatgtgaagaactctctcggtgacctcggtgccatttagcaggccatcgaattcgacactgaatccgatggaaaagagctccaagcagcattagttgagtggacggaccagcgaaccgtgcctacatgtgtttattggtggaaacccattggt

SEQ ID NO: 14861 - DNA, 257 bp, Glycine max
  Clone ID: 701069350H1
agaggccccaaaagctgcacacattgcccttcctgtccaggaatttgagatctagcaactaacaaggcaataatgaagttcttggttcagtgcccttgctgctcttgctttgcttcatgaagcaaagcaaggaaggcaaagtcaagaagtccaagaaccaaggtggagaaaaacaggttaggaaaggaaggattgaccttgtaactccatttcaagcttcctttggtaatcattagtattatataggcatgcacaac

SEQ ID NO: 14862 - DNA, 208 bp, Glycine max
  Clone ID: 701069353H1
ctcctttgtgcaatttggacagttggtcacctgtaaaacttccacctgtacctagagactcctcatctcctgctgtcatagataaagaagagcatattcaggaagcaatggatgctgatgtaattgaacgatctggtgccacaaaagcagaaccagagagtataacagaagatggggagcttcccaacggttgtttccaaaagtgtct

SEQ ID NO: 14863 - DNA, 160 bp, Glycine max
  unsure at all n locations
  Clone ID: 701069354H1
ccgggctccgaggctactctattaggcgctgttctctcgtcttctacaaaattctctgttcgatctcaaccaaggttgttccttccaccgccatgagtttcctcttcggaaagcganacacacccgcagagcttctgcgggaacataagaggatgctgga

SEQ ID NO: 14864 - DNA, 266 bp, Glycine max
  Clone ID: 701069358H1
ctctctgtctcgtttacacatctctccaacctttcactttcgtttctcagttttattcgaatccctctctcaatctcctttccaaatggccagcgttgaggttgcacagcaaacaccaacaacagttccagaaaatgaaacaaccgaggtaagcaagacccaggaaacaaccccagtcactgaggctcctgcaacagaacaaccagcagctgaggttcctgcaacagaacaaccagccgctgaggctcctgccccagaatcaacca

SEQ ID NO: 14865 - DNA, 266 bp, Glycine max
  unsure at all n locations
  Clone ID: 701069363H1
ccccacgatcgncattcacgccatataactattgatcacaagctaaatctatctgttcaaaatgcttggctgtcacaagagagtcagattccaagggctcctactgacagtgaagttacgacacctgaaagtgaggataaaacccagaactcttccgattctgaagatgggcttccacctcttgaaaagaacatgaatcatttgagcatagtcaacagtgatgaagagagtgaatagattcattttacatctttaaggctgcggta

SEQ ID NO: 14866 - DNA, 258 bp, Glycine max
  Clone ID: 701069364H1
gcttgggataatctcacgcttcataaaggccagagcacaaaagggtagtgatcatggaatcaaagcacaaggagatgggtggttgctaactgttgccttaattgaaggaagcagtttagcttctgttgattctagtgggttgtctgatccctatgtggtgtttacgtgcaatggaaaaacaagaactagttcaatcaagttccagaaatctaatcttacatggactgaaatatttgagtttgatgcaatggatgatcc

SEQ ID NO: 14867 - DNA, 284 bp, Glycine max
  Clone ID: 701069365H1
aatcatcaaccatggcagggagattgacgaacgcagcatcgaggatcttaggcggaaacggcgtcgtttaccgatccgttgcttccttttttcggcttcggttcgggattgggcttcccggtgggcaaaaattattgttcggaaaaaccctttcccatgattgaggaattcttgtgggacaacggcattgcatttccggaaccgtgtatagatcgtattgctgacactgtcggaaagtatgaagcattggcctggctgtgtgggggattgagttttttcgcgcc

SEQ ID NO: 14868 - DNA, 89 bp, Glycine max
  Clone ID: 701069366H1
tctttgcgcagttctctacctctcctttcaagatgcagatcttcgtcaagaccctcaacggaaagaccatcagccttgaggtggaaagc

SEQ ID NO: 14869 - DNA, 264 bp, Glycine max
  unsure at all n locations
  Clone ID: 701069370H1
cgncgtccttcgtcgccggtgttctcgccgccggagccgctcttgcgttcggatctgctctgcggatctgaacgtagctcatggattttctcgtttacatgcgtggatttttcgtagaagcggagatttgagcagcattagtctataactctctctctctctctccctacacctctctatatatatcttgatatgctcatgtagagattatcactaacatatgtcgatttctggatctatatggcgtttatggcttgagtagta

SEQ ID NO: 14870 - DNA, 279 bp, Glycine max
  Clone ID: 701069371H1
cagaaactcaactttgagtagataatactgctggatgtctcgtctctaattattgtatttggaaaatagttttgacttgaggatctaatcattaccagatttaatatacttggcaaatggggtctgaaggtcctaacgacaccgacaacaacaattcatgtgacaggatttaagacattccattgagtttcagagaatcgaacagaaacaattgccaataagttgacggagtacatgactacgaagggtttgccaaagggtttagtgatcgggagctgc

SEQ ID NO: 14871 - DNA, 268 bp, Glycine max
  Clone ID: 701069372H1
cttgatttgtagtttgttttgtgctttagataaaagttctgccaaatcaagaggggttttaagatcatagtgtgtgttttgcaacaatggctaagttctttgctgctatgatcttggcactctttgccatttccatacttcaaacagtggtaatggctgctaatgaacaagggggcccattgtatgacaacaagagcaatatggaagtggaattgtcaagagttaccatggcccatcacaatgcttcgagagatgtagccagacccat

SEQ ID NO: 14872 - DNA, 265 bp, Glycine max
  Clone ID: 701069373H1
ccaaaatgaacaacctcttctctctcttcttcctcctcttcttagcctccgccgccgccagcgtccccgcccacaacatcacccgcatgcctgccaaacaccccggcttctccaccttcaaccactatctctccctcacccacctcgccgaagagatcaaccgccgccagaccatcaccgtcctggccctcgacaatgccgccatgtcctccctcctcgacaagcacctctccctccccaccatcagaaacgtcctctccctcca

SEQ ID NO: 14873 - DNA, 258 bp, Glycine max
  Clone ID: 701069374H1
cgaacgtttgcaatactctcttctcttgttttgctcttaatccaacccagctttgttcgcggagcttttgtcacgtttcaaaatgctgccaagactggtggccctgctgctgccgcagttggtggaaaactaatccgcactgagcttctaactagtgcttggactggtttctttgctggctgcttgcacacactgtcagggcctgaccaccttgcagctttggctccattgtcaattgggcgaacccgaatggagagt

SEQ ID NO: 14874 - DNA, 239 bp, Glycine max
  Clone ID: 701069375H1
cattttatgggtaccaatttatctatggacactgcctatcagactaacgttcttgtttaattagtccatgcatctgcatcttgggcaccataagattgtatataaacatcaattatggtgtgttgtgtatgttgtgcaagacctggaacttcacctttctacgtacgtgtgctgttaggatgcagtgtgctttgatgatgctttgatgaatatgcagtgtgcttttttaagtctaaaaa

SEQ ID NO: 14875 - DNA, 258 bp, Glycine max
  Clone ID: 701069376H1
caagacagcaatggacgaggctattgatgctatgaatgggatagatttagacgggcgaactattactgttgatagagctcagcctcaacaaggatcaactagagatgatggtgatcgttaccgggagcgtggtcgtgatcgtgatcgtaaccgagattatggaggtggaggtggtcgaggatctaatggtggtgaatgctttaagtgtggaaaacctggtcattttgctagggaatgccctggtgaagggtccagggg

SEQ ID NO: 14876 - DNA, 257 bp, Glycine max
  Clone ID: 701069377H1
tcggaaaagaaaaatcagctttcttcaagcaccctagatttcctctctctctctctaaaatggcgttctcttcttttctcggccgagtcctcttcgcctctgttttcatcctctccgcttaccaagaatttaatgcttatggagttgatgggggacccacagcaaaagcactcagaccgaagtttgatgcctttgcacatcaagtacattctaaagctggctttcaacttccagatattgatatgaaaattttagtt

SEQ ID NO: 14877 - DNA, 261 bp, Glycine max
  Clone ID: 701069379H1
gctccgacaccatcgataacgtcaaggccaagatccaggacaaggcgggtatccccccggaccagcaacgtctcatcttcgccggaaagcagctcgaggacggccgcaccctcgccgactacaacatccagaaggaatcaacccttcacctcgtcctccgtctccgtggtggcatgcagatcttcgttaagaccctcaccggcaagactattaccctagaagtcgagagctccgacaccatcgacaacgtcaaggctaaga

SEQ ID NO: 14878 - DNA, 259 bp, Glycine max
  Clone ID: 701069380H1
ctgatttgtagtttgttttgtgctttagataaaagttctgccaaatcaagaggggttttaagatcatagtgtgtgttttgcaacaatggctaagttctttgctgctatgatcttggcactctttgccatttccatacttcaaacagtggtaatggctgctaatgaacaaggaggccacttgtatgacaacaagagcaaatatggacgtggaagtgtcaagagttaccaatgcccatcacaatgctcgaggagatgtagc

SEQ ID NO: 14879 - DNA, 260 bp, Glycine max
  Clone ID: 701069383H1
ctcacctcacactctccaaaccctagcggcactacacacgttatctctctctctctctctctctctccctctctccttccccaagatgtcgagcggcgatcccgaagaccgagaagtagcagaaggcaccggccgtcgcgaggaggaggacacgggagaacaggtggcccccatggtcaagttcaagaaggttcctgtcaccacgggcaaggaggaggaacatgcaatcctagatctcaaatcgaagttttacgggttcg

SEQ ID NO: 14880 - DNA, 111 bp, Glycine max
  Clone ID: 701069384H1
atgctggaatctgcagatcgtgatgctgttttggccaatgttgccatcaagaatggcagcaaaggttaccacgtgattgtggaaattgcttgtgtgctttcagctgaagag

SEQ ID NO: 14881 - DNA, 98 bp, Glycine max
  Clone ID: 701069386H1
cgtccctcacactctccaaaccctagcggtactacacactagttctatcgctatctccccaagatgtcgagcgccgatcccgagcacagagaagcgga

SEQ ID NO: 14882 - DNA, 226 bp, Glycine max
  Clone ID: 701069387H1
ctggtgaagttcctgaagcctaacaaggcagtgatcgtcctgcagggccgctacgccgggcgcaaggcggtgatcgtgaggcccttcgacgagggcaacagggagcgcccctacggccactgcctcgtcgccggaataaagaagtacccaagcaaggccatcaagaaggactccgcgaagaagaccgcgaagaaatctagggttaagggcttcgtacagctcgtga

SEQ ID NO: 14883 - DNA, 255 bp, Glycine max
  Clone ID: 701069389H1
cgttgtgactcgttcttcttcgtcgttatcttcttcttttgtcgtttgtgtgtttgtcttttctctcacctgaaaatgtcttgctgcggtggtaactgtggttgcggaagcgcctgcaagtgcggcaacggctgcggaggctgcaagatgtacccagacttgagctacaccgagtcaaccaccaccgagaccttggtcatgggagtggcaccagttaaggctcaattcgagagtgctgaactgggtgttcccgct

SEQ ID NO: 14884 - DNA, 255 bp, Glycine max
  Clone ID: 701069390H1
gtgcagtggttctactactttgcttcttgctgcttcactctcagatggctcgtgctgccacctacacagttggagattctgggggttggacctttaacactgttgcctggcccaaaggaaagctctttcgggctggtgacacacttgctttcaattatagccctgggactcacaatgtggtggccgtgaacaaggctggatatgatagctgcaagactccaagaggagccaaagtgtataagtcagggacggatc

SEQ ID NO: 14885 - DNA, 257 bp, Glycine max
  Clone ID: 701069391H1
cgcatttggttatatacttctccgagacccgtttagctggagaaactccactgggtattttgatagccatgattgggatgatactatattcttactattgcactcttgagaatcagcaaaaaactcgtcgaagctgcatcgcaatcatcccaggcaagagaagatgaatctgatcctctgatgaatgtggaacatggaagtgcagttgtgagttctaatgtcggacaaagaccaatgtctcctgtatggagcaagag

SEQ ID NO: 14886 - DNA, 244 bp, Glycine max
  Clone ID: 701069393H1
ctatttctcaatctctctgtgtgcggctgaggattccgaacgagtgaccttccccgtttctcgcaaagtttaagtcatcatgggtaaggacaaggttcacatcgacattctcgccagtgaacatgtcgactctggaaagtcaactaccactggtcacttgatctacaagcttggaggtattgacaagcgtgtgattcagcggctcgagacagaggctaccgagatgaacaagcggtcattcaag

SEQ ID NO: 14887 - DNA, 248 bp, Glycine max
  unsure at all n locations
  Clone ID: 701069394H1
ctggtgtttcactgcagaagcaaaaacatcctccttttagtgttgttagccatagcaatagaaacgggatggtcatcacaagaagaaagcagcatcatatcacgattccagcaatacctgaaaaccaanactgnccaacccaccccgcgttaccacgaagccgccgatttcctgatatcccaaggtaaagccctctccctggaatcccaaagcattgagtttgtggcaggcaagccacttgtccttct

SEQ ID NO: 14888 - DNA, 273 bp, Glycine max
  unsure at all n locations
  Clone ID: 701069395H1
attctggttttcaacaaagtcttgttgaaaatgctttgcttggtctgcaatctagacanaaagaatgacagttacgattagcaaaatgtgtacattgaaatacatgcagccatgacgtcaggatctggatatccatagccaatgcgcaaattattanccttgaggattttatcttactttatgtttcacggattggatgtaagcacgccacaatcaatcttcaaatacttacctattctttcattcacagagagttatatttatcagctagat

SEQ ID NO: 14889 - DNA, 254 bp, Glycine max
  Clone ID: 701069396H1
gtgcaacaagtggaggcttgaatcaacaaagaactggagtaaatctctggactcttgagattattttagtcaaacaaggaattgttcatctcgaggtgcctgttcaaaagtagaataattcattttcaacttactttcatgtaccaaatattaacgcgcatgcatctcactataagttgatcgacatttgggataaatacttattatcatgagttgtttaaattgccttgtaaatgcacacaacatgcgagtgg

SEQ ID NO: 14890 - DNA, 284 bp, Glycine max
  Clone ID: 701069401H1
gcctgcagcggtgcaacctatcagcctccaaatccaatggcttcagagaagaaactgtcgaacccaatgagggagatgaaggtgcagaagctcgttctcaatatctctgttggagaaagtggaggacgtcttaacagaaccggcaaagtggttggacaagctaattggccaaaccccatggttttccaaggcaaggtacactgtcggttcctttgggattagaggaaatgagaagattgcatgctatgtcactgtcagaggtgacaaggcgatgcaacttttgg

SEQ ID NO: 14891 - DNA, 278 bp, Glycine max
  Clone ID: 701069402H1
ccaatcagagagaaaagttagggttcacaacttttccttttccttttgcttgcgaatctgaatcaaataatcaatcatccattcaataatcaatcatgtcgtcggggaacaaattaaggttgaaaattccgaacgccgaggctttcgaggtggaggagccgttggcgctggagtcgcagacgataaagcacatgatcgaggacgactgcgccgacagcggcatccctctgccgaacgtgacgagcaagatcctggcgaaggttatcgagtactgcaag

SEQ ID NO: 14892 - DNA, 277 bp, Glycine max
  Clone ID: 701069403H1
aatccctcccattgttaatccaccagtcacaatccctcccattgttaatccaccagtcacaatccctcccattgttaaatccaccagtgacaagttcaacccgttgtgcttcaaccattagtgaagcccccgggttttctccctccaattcttaacccaccaagtacaccaacaccgtcgccggggaagggagggaacactccatgtccaccaccaaagtctcctgcacaggctacatgccccattgacacgctcaaactaggtgcttgtgtggatc

SEQ ID NO: 14893 - DNA, 274 bp, Glycine max
  Clone ID: 701069404H1
taagagaagagaagagaagggatttggatctgaaaagagaagatggggggaggaatggaagcaaacaagaacaagttcatagaggattggggcaatgccaagagagatctgggagttcaatttccgttggattcgccgcaaccttgctcttgttggcatcttcggcatcgctattcccgtcctcgtctacaagggcatcgtccgtgaattccatatgcaagatgaagataatggtcggccgtacaggaagttcatgtgagagagtatggagagt

SEQ ID NO: 14894 - DNA, 276 bp, Glycine max
  Clone ID: 701069405H1
tcgtcgaatacatgccatttactttgtccatgtttttaaccatcaatgctgttatgtggttcttctatggccttctcctcagggattattacgttgctcttcccaaacaccgtttggcgtttgtccttcggcataattcagatggtgatgtatttgatgtacagaaacgccaccccagtggcactagaggagccagtgaaggctcaagaattgaatgggcacatcattgacgttgtgaagataggaacaatggaaccgaatcacggtggtgctgtt

SEQ ID NO: 14895 - DNA, 274 bp, Glycine max
  Clone ID: 701069406H1
tgagtcctcaaagatctatgcttacctcttcctctgcatgatctttctctcttccgccactcccattctcggttgtgcgtactgtggcaaaccccccaaaaagcacaagcctggtcaaaacaccaaagacacccaaaacacccgttgttaagccaccagtcaccatccctcccattaatgttcctcccgttgttcttccaccaatagtgaagcccccaggtattctccctccaattccaattattaacccaccaaccacaccagggaagggagg

SEQ ID NO: 14896 - DNA, 266 bp, Glycine max
  Clone ID: 701069407H1
tttctgtgccaacaaaagaagatggcctcacaggtttgcaaagctgcttccagagccgcgaggtcccttctctccgcttccagagcctcccatggacgtgcggttggggctgctacggctgtttcattgagctgcaaagtgcctcttttctacggaaagaacggttctggaagtggttccgcttcatcatcatcatcatcatggatttcaggagcacttgctcttcctgccgcagcttacatgttccaagatcaggaggtgcgcgc

SEQ ID NO: 14897 - DNA, 100 bp, Glycine max
  Clone ID: 701069408H1
cgctaaactaaagcaagtgaggatggttattcagcagcagttacacctcaaagcctgtatctcaaacgttttcttaaaaaaactaacatgattgtagatg

SEQ ID NO: 14898 - DNA, 261 bp, Glycine max
  Clone ID: 701069409H1
cttcttcccaaccactactactcaatcactgcagatctcaattgcatcgctgtccatggctaccatcgttagcatcaaggcccgccagatcttcgacagtcgtggcaatccaactgtcgaggtggatttgacttgctccgatggtacttttgccagagctgctgttccaagtggtgcatccactgggatttatgaggcccttgaattgagagatggaggatctgactaccttggaaagggtgtatcaaaggctgttgacaa

SEQ ID NO: 14899 - DNA, 264 bp, Glycine max
  Clone ID: 701069410H1
attgcaagaggaaaagaagaagaaaaaaggctccaccgaaatcaatttcccacagaatcaaacaaatcgttggagttggaaaacaaaacaagagaaaatgggtggacgcaagtgtttgttaacgttggtgttgagtttggtgttgatgatgagtatggcagaggcgcaatctggtactagcgcagactgcgcccaggagctaattccatgcctggactaccttaatggcacgatcaacccaccaagctcctgctgcgaccctct

SEQ ID NO: 14900 - DNA, 265 bp, Glycine max
  Clone ID: 701069411H1
tctctatcaccccattttctcaaacacctacacaaaatgtgcttcctcaacacaaagtccctggctcacttcatgttgctaacaacaattgtagttggcattgcaatgggagattcatcaaaggacaaagaggaatgcactgagcaattggcaggcctagcaacatgtctgccctatgttgggggtcaagcacaagctccaaccccagattgttgtagtggtctcaagcaagtgctcaagaacaacaaaaagtgtttgtgtgtta

SEQ ID NO: 14901 - DNA, 243 bp, Glycine max
  unsure at all n locations
  Clone ID: 701069412H1
gagtttgttgtgagctataagctagtttatcgtgaggagaatatgaagttgtttgttctctttgttgctgcagtagttttggtagcatggccatgccatggcgcaggctaccanaggttccctctccgaatgacaactggctatggtgagcgttcttcggaggtaaaatgcgcaagttttaggcttgctgtggaagcacacaacatccgagcctttaaaaccattcctgaagagtgcgttgaa

SEQ ID NO: 14902 - DNA, 265 bp, Glycine max
  Clone ID: 701069413H1
gggtgatcggggagtgccggcgtgcgttgaagtttgctaggttcgtgagcaggttcgggaagagttaccaaagcgaggaagagatgaaggagaggtacgagatattctcgcagaatctcaggttcatccgctcccacaacaagaagcgtttgccctatactctctctgttaatcattttgctgattggacttgggaggagttcaaaagacacagactaggagctgcccaaaattgctctgccactcttaacggcaaccacaagct

SEQ ID NO: 14903 - DNA, 259 bp, Glycine max
  unsure at all n locations
  Clone ID: 701069414H1
gctagctacagacattgagtcactgaagaagaaaattactggaactgaatagagtggtgttagcaggtaccaagtcaagtttatcttctgtgagcatcatntcattttgttgtgctgtttatctcatgtataagagtcatatgtatcccttgaagtagaatagaattcctctcaacctgtaatgaacccatttcattgttaaaaataatgtagcaaattttacgtaaaacaaagaaaataaaagcataagagattagag

SEQ ID NO: 14904 - DNA, 209 bp, Glycine max
  Clone ID: 701069415H1
cactagtgctcaaggacttggcaattgacttatcattttcaagctgcttctatggccacaacttatacaagcacaggagttaccgaattacatggcacagggacccatacatgctctgaaagtgatagtcagtaaatgaaataacccataagataagtagaggggtgtggaaaatgtcagctaacttagcatgggatggggacatagta

SEQ ID NO: 14905 - DNA, 263 bp, Glycine max
  Clone ID: 701069416H1
acccaacacctgcttctctttctcatttcaaactccttcaagcaatgaattctcgaatcaaagttcttcctctctgaagcagcagattctggagctagctaatagtctcagcacggtgaaatggatgaagagataagggagggaatccaagagcacccagaaattgcattatgaagagttcagaacaagtgctgtcataaggcgtgagcttgacttgttgggtgttgaatacaagtgcgctgtggctgggactggtgtggtgg

SEQ ID NO: 14906 - DNA, 78 bp, Glycine max
  Clone ID: 701069417H1
tcgagacaagcgataaaactagtacttgatcccatctgctgcaatcccagtttcactgatctctcggagaggatggat

SEQ ID NO: 14907 - DNA, 256 bp, Glycine max
  Clone ID: 701069419H1
gtctcttccattcacaaccttaaacctttctttcttgtaaactttattgattgattctgagaatagaactaagagggtatagacatggctagcggcatttgcagcttctttttgggtcctgctcctggctttccccactgtatttggagctgaccatgaagttggtgacactagtggatgggccccggagttaattacaacacctgggcctctgggaaaactttcacagttggtgacactttggtgtccaagtatg

SEQ ID NO: 14908 - DNA, 84 bp, Glycine max
  Clone ID: 701069420H1
cgatcatccatactgaaatggcggcagtagtatcagcatgctctcatcgattgtctgttcttcgttcagaaccattatcatcat

SEQ ID NO: 14909 - DNA, 173 bp, Glycine max
  Clone ID: 701069421H1
gttcggtggagggagggagtcgtagcagcggaagctctagcttgggtagcgaatcacaatggcgagaggattaaagaagcatctgaagaggcttaatgccccaaaagcattggatgcttgacaaactgggtggtgcatttgctcctaagccctcatctggaccacacaacata

SEQ ID NO: 14910 - DNA, 74 bp, Glycine max
  Clone ID: 701069422H1
cttaggcttaagccccatcaggatattgtggaaaattaatagccgcatggagagctgaagctgtccacaccaca

SEQ ID NO: 14911 - DNA, 264 bp, Glycine max
  Clone ID: 701069423H1
ggtgaactgagtgctgctgagttggatagtgtgatgactgtggttgccaacccccggcaattcaagattccggactggtttttgaacagaaagaaggactacaaggatggcaagtattctcaggtggtgtcagatgcactggatatgaagttgagggatgacttggagagacttaagaaaatcaggaaccatcgaggtttgagacactactggggtcttcgtgtacgtggccagcataccaagaccactggtcgtaggggtaaa

SEQ ID NO: 14912 - DNA, 254 bp, Glycine max
  Clone ID: 701069424H1
cgaactgagcttataatgattcatttctaattcctagttttctaacttttttctatatttcttttctctcaatttgcaagaatatactaattcagtttcatcttgttaatcaattagatctacgacttcgacggggattataaggatgtcggcatttctctgttcacaacaaaatatatggttttcaaaaattgcctatctaatgccaaatctgatacaattctgtcagcatggaatccccaacccgattgggg

SEQ ID NO: 14913 - DNA, 262 bp, Glycine max
  Clone ID: 701069425H1
agcatggtgccctgaggatgagaatcgtcatgctggtgatcttgggaatgttaatgtcggtgatgatggtactgtcagcttcactattactgacagccagattcctctcactggaccaaacaacatcatagggaagggcggttgttggtcatgctgatcctgatgatcttgggaagggtggtcatgagcttaccaaaactacctggaatgctggtggcagagtagcttgtggtatcattggtctgcaaggataaactaatca

SEQ ID NO: 14914 - DNA, 198 bp, Glycine max
  Clone ID: 701069426H1
attagttcttgttattcattattcattctcagcttcttgtcttcaggggggcaaaaggggtcacttttcagatccgagattgagctcctttacccatcatcatcatggagctcctcgggtacctgaatcagggtcacccttctagaggaacaacacttgttattactctttcattggtgctttcgacacttgtgtcct

SEQ ID NO: 14915 - DNA, 260 bp, Glycine max
  Clone ID: 701069427H1
ataccttgtaagcagtcacaattctcggcttctttgcgagccacgtcgaggacagagtcgatcaactcggcgccttcggtgtagtggcccttgagccaattgtcgccggcgccggactggccgaagacgaagttgtcggggcggaagacttgccgtatgggccggatctgatgctgtccatggtgccgggctcgagatccatgaggacggcccgtggaacgtaccttccgccggacgttcattgtagtagacgttgatcc

SEQ ID NO: 14916 - DNA, 265 bp, Glycine max
  Clone ID: 701069428H1
cttccctcttccgtgcacagcttgaacacaccgcgtttcggagaacgacgtcgcaatggggaggaggcctgcaaggtgttatcggcagataaaaaacaagccataccccaaatcacgcttttgccgtggtgttcctgatcctaagatcagaatttatgatgttggtatgaagaagaaaggtgttgatgagtttcccttctgtgttcatctggttagctgggaaaaagaaaatgtctcaagtgaagcattggaagctgctagaatt

SEQ ID NO: 14917 - DNA, 96 bp, Glycine max
  Clone ID: 701069429H1
gcaatggactcgtaagactagtaactaaggacataaaggtttctaatttatttcgttcaattctccggcggcaccgcaaccgattccacacaacat

SEQ ID NO: 14918 - DNA, 217 bp, Glycine max
  unsure at all n locations
  Clone ID: 701069430H1
gctataagctagtttatcgtgaggagaatatgaagttgtttgttctctttgttgctgcagtagttttggtagcatggccatgccatggcgcaggctaccanaggttccctctccgaatgaaaactggctatggtgagcgttcttcggaggtaaaatgcgaaagttttaggcttgctgtggaagcccacaacatccgagactttaaaaccatccctga

SEQ ID NO: 14919 - DNA, 261 bp, Glycine max
  Clone ID: 701069431H1
ctagtttatcgtgaggagaatatgaagttgtttgtcttctttgtcgctgcagtagttttggtagcatggccatgccatggcgcaggctaccaaaggttccctctccgaatgaacactggctatggtgagcgtccttcggaggtaaaatgcgaagttttaggcttgctgtggaagacacaacatccgacacattaaaaccattcctgaagagtgcgttgaaccaacaaaggactacattaatggcgaacaatttagatcaga

SEQ ID NO: 14920 - DNA, 269 bp, Glycine max
  Clone ID: 701069432H1
gagaattgttcctctcttccattcgtgtacccgcaaaagaatcatgacgagttcctctgctgccgctcgcaagaatctgagtaagattgcctgcaataggctccagaaaggagtcgtggagtggcaggtcatcccccaaatcggtttcaggcacaaggtcacggaaattctccagaggtgggtggttgaagtcactggagctcctgggacactttacgctaacgagacctaccagcttcaggtcgattttcctgagaattacccgatgg

SEQ ID NO: 14921 - DNA, 232 bp, Glycine max
  Clone ID: 701069433H1
gaacaagcttgcatctttgtcttcacattaatgaagtaacaataatatcatgatgacccgccgttgactgtaggagtagttacatgatgctattgacggtagtttattctcggggtggcaacggttgatcctcctgatttggaagcaaggatgcatccttggtgtccacatcattgaggtaggcatatatcatgatgttgctggtcgttcaaaaaaaaaaaaatgcaaaaag

SEQ ID NO: 14922 - DNA, 231 bp, Glycine max
  Clone ID: 701069434H1
tcagatcttaacccctaagaaaagtatcgaaaaaagactcatagtccatcacccagcaagaaaaaagaaaatcgaagaggaagagcaaggacacaacacaaagaaaccaaaggaggacttggggtgcagtgggtgaatctaacttaagtggtcgaagttgaggttgcggtggcaatcctgtaaaccttccaaggccaaaattcttaagggacggtttggcttctctggttt

SEQ ID NO: 14923 - DNA, 269 bp, Glycine max
  Clone ID: 701069436H1
gctagtttatcgtgaggagaatatgaagttgtttgtcttctttgttgctgcagtagttttggtagcatggccatgccatggcgcaggctaccaaaggttccctctccgattgaaaactggctatggtgacgcgtcttcggaggtaaaatgcgcaagttttaggcttgttgtggaagcacacaacatccgacacattaaaaccattcctacagagtgcgttgaaccaacaaaggactacattaatggcgaacaatttagatcagactcta

SEQ ID NO: 14924 - DNA, 261 bp, Glycine max
  Clone ID: 701069437H1
ctgcgactgcgcttcacgatgggtgcttacaagtatgtttcggagctatggcgcaagaagcagtctgatgttatgagattcttgcagcgggtgacgtgctgggagtaccggcagcaaacttctattgtccgtttgacaaggtctactcgccagacaaggctcgccgcttgggtttacaggctaagcagggttatgtgatttaccgtgttcgtgtacgaaggggtggccggaagagaccagttccaaaaggtattgtttatg

SEQ ID NO: 14925 - DNA, 75 bp, Glycine max
  Clone ID: 701069438H1
ttcactaaaaaaaaaaagagtggagaatgtcagacggaacattgcaggtactggacggaacgtacctgagaggcg

SEQ ID NO: 14926 - DNA, 262 bp, Glycine max
  Clone ID: 701069439H1
agcaaattaactacacattcctctgttttggctcccctgttaaaccaagaaacttccaatggcaccccatgcatcttcttttgctcttgttcttgtcatttttctctttgttgaaatgcacttccacggtgcaactgctgactatggcggctggcagggtggtcatgctaccttctatggtggtggtgatgcttctggcacaatgggaggtgcatgtggctatgggaatttgtacagtcagggatatggaaccaacactgca

SEQ ID NO: 14927 - DNA, 255 bp, Glycine max
  unsure at all n locations
  Clone ID: 701069440H1
gaactcatcacttactggaagccttgttgtgagtaagagaaaaggcttcctgcaccgagcacaccaacttgatacctctgattctttctttggttagaattccacagaatatggagatcttntnnacaataactcccaacttttggaattcaagggtttttgcaaggaggaggaagactcattgctagggcaagtggaaatatggaggtacatgacatgcttcacggattccgtggccttgaagctgtcatagag

SEQ ID NO: 14928 - DNA, 265 bp, Glycine max
  Clone ID: 701069441H1
cggctcgagggtaatggttgtaggaagcaaccgaactgggtaaaaaagcaaaagaattgaagaaagcagctgagtcacttcatcaggaagaaagaagtggttcgaagggaaggaaatttcgtaaaaatgtgaaatcagtagagaaggagttgtttcaattggaagaagatgtcaagcttcttgaggagatgtatccacaaggggaaaaggctgagacaacatgggcactaacagttctagggtatctggcaaaatttgttttggg

SEQ ID NO: 14929 - DNA, 262 bp, Glycine max
  Clone ID: 701069442H1
aaggcttatggtggatacctaggcacccagagcagagggcacaaggtgaggattcctgttctggccaacggataccgacgatagatagcatagtgaagtttggtcagcaaaggaaaggaaagaagtgctgcttgtaatattctttgtaacctgtggggaataaggtatggcgctacatttattcgtctaaatatataaatatgtaatgttaaattatgaataggtgtaaaggtaagcaggtgtaaggggtcactcctagttt

SEQ ID NO: 14930 - DNA, 264 bp, Glycine max
  Clone ID: 701069443H1
gggttggttggtcccattccataggaagagatcaaagagaagagaaaagatgtttgagccgcagcagctatacactcgagcgaagaccgaggaattcgacctcgaatcaggggaaaccctctacccagggctgagcgtcggcgagaaccagctccgatggggcttcatccgcaaggtctagggcatcctctccgcccagatcgtcctcaccaccctcgtctctgtcaccaccgttttctatactccaatcaatgacctcctcaa

SEQ ID NO: 14931 - DNA, 262 bp, Glycine max
  Clone ID: 701069444H1
gaaagaagaaaaagaagcgaaactaaagtcagcattcgaaaaacatgagtagcatcggtacaggttacgatctatcggtcaccactttctcccctgatggccgcgttttccagatcgagtatgccgctaaagccgtcgacaacagcgggactgttattgggatcaagtgcaaagatggggttgtgttgggcgttgagaagcttattccgtcgaaaatgatgcttccgggttccaatagaagaatacactccgttcatcgtca

SEQ ID NO: 14932 - DNA, 260 bp, Glycine max
  Clone ID: 701069445H1
cccaaacaatcgcttattgctaacgcgacctcttcctgttcccgctgcatcagcctcagagcacccgctaggtttcttctgcacacccaaccaaatggcggatcctgagttggaagcaatcagacagagaaggttgcaggagcttatggctagccatggtggcgtgggaaatcaacagaaccctgaacaggagaaagctcaggatgatgcaaagagggaggctgaggaacggagacagatgatgcttagtcagatattgt

SEQ ID NO: 14933 - DNA, 265 bp, Glycine max
  Clone ID: 701069447H1
gaagaagatggcgtcgagcggagcgctgccgttttggagggcagcggggatgacatacatcacatactcaaacatatgcgcgaatctggtcaggaattgcctcaaggaaccctacaaggctgaagccatctctcgtgagaaggtccattttgctttctccaaatgggtcgacgccaagcctgaaaaacctactattcgttcagacaccccagagcagtgttccggaatagttggaagctataaatgcataaatctttgagatctg

SEQ ID NO: 14934 - DNA, 267 bp, Glycine max
  Clone ID: 701069448H1
gtacaatgaaagactcagcaaaaaagaggaagtttactgattttaatggtcaactgatagctgctgatacaagtctccgggctctgaagaaattagctgggagacaaatgggggatgtcataaccagatctaacgacggaattctttctaacgaggacttcaagaggatcaaagaactgaaggcaaaaagtgaggcaaaaaatgcgttggctcagcaagggctagcgaagtcagctgcaactaaggttccaagctctggtcaactaa

SEQ ID NO: 14935 - DNA, 276 bp, Glycine max
  Clone ID: 701069449H1
atggctatgagatcgtgggtgagtcgaggatccgtgactcgtttgatggactcagcaaatcgaggggctttcagtcgttctttagcgacaaaggtcccgttctcaagcaagaaggacaaggccaaggaaaacgtcaacatccgaaattgggaaagggaaaggttggagaaacagaagcaacaggctgagaagaccaaggcagacaagggcaaagatgctgctgctgataagaaacctgaaggttctcaaaagggctgagtttatccttcacacaac

SEQ ID NO: 14936 - DNA, 275 bp, Glycine max
  Clone ID: 701069450H1
cacaacacaaccccgaaatagcttctgcttctgttcccatggctttctcgctgagctctgttatcaacaacaacaagccttcatccggaagccctccttaaggcattaccccttacgggcaaccaaagaggacccttttcacaacaaaggcagtgtcaacttccaaggttcaaatcaatgcatctttgaaggagaaggcagttgcaggactcacagcagcttctgtgacagcatctatggtggttccggaggtggctcatgctgctggatatgag

SEQ ID NO: 14937 - DNA, 262 bp, Glycine max
  Clone ID: 701069451H1
ctcccttcaagatgcagatcttcgtcaagaccctcaccggcaagaacatcgaccttgaggtggaaagctctggcaccaacgacaacgtcaagggcaaggatccaggcaagggagggaatccccccggaacaagcaacgtctgcattttcggccgagaaagcaacttggagggacggaggtacccttgctggactacaacattcagaaggcgagtactcttcacatcgtcctccgtctccgtggtggcatgcagatctccgtt

SEQ ID NO: 14938 - DNA, 268 bp, Glycine max
  Clone ID: 701069452H1
attctcatgagtgggtgaaagttgatgaaaattctgcaaccgtcggcataactgatcatgcccaagatcatttaggtgatgttgtatatgttggaatgccagaagtgggagcagctgtaacccaaggaggtagttttggtgacattgaaagtgtgaaggcaactagtgacattaactctcacgtttcaggaaaagttgttgacgttaatgaagcgcttaacagctctcctgctttgatcaattcaagcccttataaagatggatggat

SEQ ID NO: 14939 - DNA, 267 bp, Glycine max
  Clone ID: 701069453H1
ctttctcttctctgtctaaggggtgccctgagatcacattgaacaatggtgaaggctgtggccgttcttggcagcagtgagggtgtcactggaactattcacttcgttcaggagggaagtggtccaaccaccgtaactggatccctggctggtcttaagcctggtctccatggcctccatgtccatgccttgggggacactaccaatggttgcctctcaactggatcacatttcaatcctaataacaaggagcatggtgcccctgag

SEQ ID NO: 14940 - DNA, 110 bp, Glycine max
  Clone ID: 701069454H1
gttgtgagctataagccagtatatcgcgaggagaatatgaagtcgtctgtcttccccgtcgccgcagtagtccccgcagcacggccacgccatggcgcaggctaccaaag

SEQ ID NO: 14941 - DNA, 262 bp, Glycine max
  Clone ID: 701069455H1
agccttcaaagaagtagccatcattcggcatccacgtattggagaatatgcatttggattcatcacctcatctgttacccttcagaactattctggagacgaggagttatgctgtgtctatgttcctacaaatcatctttatattggtgatatatttcttgtcaacaccaaggatgtcattaggccaaacttatcaattcgtgaaggaattgagattgttgtttcgggaggtatgtcaatgccacagatcctatcaacgatc

SEQ ID NO: 14942 - DNA, 262 bp, Glycine max
  Clone ID: 701069456H1
gacagtaacattgggttgtgatttgtgagggaagaaggggtagaaagaatcaggagaaggaaataatcatcaaccatggcagggagattgacgaacgcagcatcgaggatcttaggcggaaacggcgtcgtttaccgatccgttgctatctctcttcgcctcgctccggcatgggcctccccgtcggcaaacactatgttcccgacaaacccccttcccatgattgaggaactcctgtgggacaacggcactgcatttcccg

SEQ ID NO: 14943 - DNA, 256 bp, Glycine max
  Clone ID: 701069457H1
agacgagaaaggagaagaagagaatcataagaaagcaagacagaaaatgggagtggagaagcagttgttgaggcctggcaccggtcccaagccaattcccggtcagaacgtcaccgttcaatgatatggtttcgggaagaacggtgacctttctcagaatttctggagcaccaaggatcctggccaggaccctttcactttcgaaatcggccagggactgttatcaaaggatgggatgaagggtgcttggcatgca

SEQ ID NO: 14944 - DNA, 259 bp, Glycine max
  unsure at all n locations
  Clone ID: 701069458H1
gaaacggtgtttctagggttcgctttcgcagttgagatttgagaatcgactttcagaactggaaacacggccggcctaccagccccgctccgtcttcatncccccgatgtcactctcccgcctgtggggcgtcactgccgtcaccggcgctctctacctcgttcagccatggggatggttgaagaagacattcttggagaagccagatcctgagcaaacctgagttggcatctgagagagtgatttgaatttcttgatc

SEQ ID NO: 14945 - DNA, 260 bp, Glycine max
  Clone ID: 701069460H1
ctcattaattgcaagaacggcacttcgttgcttggtgatgtccctatctgttctcttcactcttggtcttgcgagagaaagccatgccagagacgaagatttttggcatgctgtttggccagacactcccattccaagttcattgcgagctcttctaaagcctggccctgcaagtgttgaaatcgatgatcaccctatgcaaattgaagaaacacagtacccgaaaaccttcttctataaagaagaccttcatccaggca

SEQ ID NO: 14946 - DNA, 262 bp, Glycine max
  Clone ID: 701069461H1
ctctctctctctcgttcgtgttcttcgtcgcaaattcaaaggaggatctctcttgcgttttctctaggttttcgctatggcgtcgaagcgaattttgattcgagttaaggatttgcagaaggatcctccaacattttgcagtgccggtcctgttgttgctgaagatatgttccattggcaagctacaattatgggtcctccagacagtccctatgcaggaggtgttttcctagtgaccattcatttccctccagattatccc

SEQ ID NO: 14947 - DNA, 256 bp, Glycine max
  unsure at all n locations
  Clone ID: 701069462H1
cacttgccatggcagcagcagcgtcaatgtgtatgagcttcaacatggcaacagcattcaagggtctctcttnttcttcttcttcctcatcgttctacgctggacgtagtagttatgctctccgagttggtaccacatcggtggtgtcattgaaccgacgctgcacgctgtccatagagaacgcctatactaagggggtgggtagcaccatgaacggctgcgactcgcatggcaagcgtctcgtagtcaagatata

SEQ ID NO: 14948 - DNA, 261 bp, Glycine max
  Clone ID: 701069463H1
cgaggtaactagaaacagtgtgatgaaaatgaaggtccttgttttcttcgttgctacaattttcgtagcatggcaatgccatgcgtacgatatgttccctctccgaatgaacactggctatggtgcccgtactccggacgtgaaatgcgcaagttggaggcttgctgtggatgcacacaacatcttcggctttgagaccattcctgaagagtgcgttgaagcaacaaaggaatacatccatggcgaacaatatagatcaga

SEQ ID NO: 14949 - DNA, 271 bp, Glycine max
  Clone ID: 701069464H1
gagcttggttacactatgccatgccttcccttcccttgcaagactaggcgcttcattactcaatactcactcatcctcctaaatctcactacggttctgtgctagctaacgtgattaggatggcggtgcaaggagagctagacaggttcaagaagcagcaagagaagtgccaaacgacactttcgagcattgcagctagtaaggccgcggcaacccaaaaatccgccgctcatggctcggccaatggaagaaacgcggcccctgcggttaa

SEQ ID NO: 14950 - DNA, 275 bp, Glycine max
  Clone ID: 701069465H1
cgatcttcgacccgaaggcaacgaactcttcacagacgttggcatcgcattcgacatgatgcttctcgctcacaacgccgggtggaaagagaagaacgaagaaaactgggagtgggctgttcaaggaaaccggtttcgcgcgttacaacatcatcaggatcaacgctctcccttccatcattgaggcgtttccaatctgaagaagatgccactaccacaactgcatgtggtttttatgttgcatgtgttgttgttattattaacagctatatgat

SEQ ID NO: 14951 - DNA, 86 bp, Glycine max
  Clone ID: 701069466H1
attaatatcatgcctccttctgcatccaaaccttcattttgtagtcggtgggggtttctcatttctctggcgttccatggatcggg

SEQ ID NO: 14952 - DNA, 258 bp, Glycine max
  Clone ID: 701069467H1
cttttacttctcagcagcttcggctagggttcagaaacgaaaaaggcgttcggtgttctgttcgcgatgagagccaagtggaaggagaagcgtatgacggaggttgagaaggaaccgccgaaagatgagacagagatccaggtagtgggttaaaccaagttggtttctgttgctttaacaattgctaatgttgtcgaatgggaaacccagttgtaagtggaactggttcccccttttggatgtttgaaacatttggtg

SEQ ID NO: 14953 - DNA, 264 bp, Glycine max
  Clone ID: 701069469H1
ggaaaaccctaagagatgaagagaactcctatcttgttccctctcttctttcttctttgtgccttcacctcatatctaccttcagccaccggtgatgatgatcatgtgtaagacactgacggcgataagcttcaaaagggttcaaattattccgtgtggcaagtgcttagagccaatggcggtggattacaagtagcaaaaccaggaaacgaaacttgccctctgactgtggtgcaatctggcaacgagctctctgaggggtta

SEQ ID NO: 14954 - DNA, 99 bp, Glycine max
  Clone ID: 701069470H1
acatactcaaactcactctttctaagtcttttctatctctttctctctctctctgtctgccatggttctctccaaacacacctccgaatccgacgtctc

SEQ ID NO: 14955 - DNA, 91 bp, Glycine max
  Clone ID: 701069471H1
cgagttccctgtgttattacattggacatgtagatcaaacatagaaaattcttctgctcttcaggtgccaacttaaattgaattgatatct

SEQ ID NO: 14956 - DNA, 265 bp, Glycine max
  unsure at all n locations
  Clone ID: 701069472H1
ccctcgagccgattcggctcgagcttctttcactttccatttccatttccatttcttctggttcactttctcgatggcctccgaacancccaccgccgacgacgccgtcaacggctccaatcggccggaaatgttctcggaaaacctcgccggcaccgtcgacgcctacgaccgccacgtgttcctctgctacaagagtcacctgtcctggcccccgcgcatcgaggcctccgacgccgatcccttccccaagcgcgtcgccgcc

SEQ ID NO: 14957 - DNA, 255 bp, Glycine max
  Clone ID: 701069473H1
agctaatgaagttaaacttgaatggacttgttcactgaggcagtggcatgcatcgggcaaattttggtttagcagttgtgtaaatattatggggggttgggagtttttggaatgaacgtttgttccataatacattgcaagttgcaactccctcccgatcaagctgttatttcgttgcccagtataaattcgctgttgttaatatactacatatacactgtatggcctttcggtgggaatgcgaaagttcggagt

SEQ ID NO: 14958 - DNA, 259 bp, Glycine max
  unsure at all n locations
  Clone ID: 701069474H1
gaagagtcaagtaaatatattgagtcccattctctctctatttaatttgtatcgataaatataaaaggtgttgttgattgactttttgtggttcgtttggtttcgattgaagaacccttcttttgctccacgtttcctcactctcaaccgttcgactcgttcgatatcaaccgagttgactcagatctctaaggaagttgcagcactgaattctctacttctngttgtgctatggaggagcaattcatacttagagttc

SEQ ID NO: 14959 - DNA, 258 bp, Glycine max
  Clone ID: 701069475H1
gctgcagcttattgcactggtctcctgttggcccgaagagtcctcaaaacacttgacatggatgaggagtatgaaggaaatgttgaggctactggagaggattattccgtggaacctgctgagagcaggaggccattccgtgctctccttgatgttggtcttattaggactacaaccggtaaccgtgtgtttggtgcccttaagggagctctggatggggggttggatattcccacagtgacaagaggtctgctgggt

SEQ ID NO: 14960 - DNA, 261 bp, Glycine max
  unsure at all n locations
  Clone ID: 701069476H1
gttgcgactaagagttgctgcttcttccgccactcagcacttccctccctctgtgcttcaccaaccatggtccgaaatcgaagctaccgttccagatccctctcaaatcgacgtcaaacttttcaaccgctggagcttcgacgacgttgaggttactgatatgtctctggctgattacattggagtgtccccgtcaaagcatgctacatatgttcctcacactgctggtagctnatcagtgaagaggttcaggaaggcgca

SEQ ID NO: 14961 - DNA, 261 bp, Glycine max
  Clone ID: 701069477H1
gcaatgtatcgtaagtcttattatctccgaaagctttctaagaagagagagagagagagaggaaatgggtaaggggggaatgtcaattgatgaacacacagaaggcaaagaagagaatatggctgtttggcttgttggaatgaacactctcaagattcagcctttcaagcttcctactttgggaccccatgatgtcagagttagaatgaaggctgttggtatctgtgggagtgatgttcactacctcaagacactgaggtg

SEQ ID NO: 14962 - DNA, 262 bp, Glycine max
  Clone ID: 701069478H1
attctctttgcgcagttccctacctctcctttcaagatgcagatcttcgtcaagaccctcaccggaaagaccatcacccttgaggtggaaagctctgacaccatcgacaacgtcaaggccaagatccaggacaaggaaggaattccccggatcagcaacgtctcatcttcgccggaaagcatttcgaggacggccgtaccctcgccgactacaacatccagaaggagtcaacccttcaccttgtcgttcgtctccgtggtgg

SEQ ID NO: 14963 - DNA, 260 bp, Glycine max
  Clone ID: 701069479H1
cagccccatcatggcttcagagaagcaagcggctcttgccgtcactccctctgatgctgatgctcctaccatatttgacaagatcatcaataaggagattccttctactgtgggttatgaggatgacaaggtgcttgccttcagggacataactcctcaagctcctacacatatccttatcattcctaaattcaaagacgggttaagtggtctatccaaggctgaggagaggcactttgagattcttggccgccttctgt

SEQ ID NO: 14964 - DNA, 263 bp, Glycine max
  unsure at all n locations
  Clone ID: 701069480H1
gatggctctgggaagaggcagtgcagtggttctactactttgcttcttgctgcttcactctcagatggctcgtgctgccacctacacagttggagattctggggggttggacttntacactgttgcctggcccaaaggaaagctctttcgggctggtgacacacttgctttcaattatagccctgggactcacaatgtggtggccgtgaacaaggctggatatgatagctgcaagactccaagaggagccaaagtgtataagt

SEQ ID NO: 14965 - DNA, 274 bp, Glycine max
  Clone ID: 701069481H1
gcaatctacagccaaaatgcctttcaagaggtacgttgagatcgggaggtgttgccaaatcaactatggcaaggaatatgggagggtcgtcgtcaatgtcgacgtcaattgataaaacaagagttcttgtcgatgccctgaaaatggtgaggtccaaagtcaatttcaaaaggttttccctaaccgatattaggattgacattaggagggtccttaggatgaaggatcttgtcaaagccatggaggatgctgatgttaagaccaagtgggagac

SEQ ID NO: 14966 - DNA, 268 bp, Glycine max
  Clone ID: 701069483H1
atcggaacaaacagggaatagaagagaggagaagatgggtttcataatggaatttgcggagaacttggtattaaagttgatggaagatcccgaagatacgggatccgaggtgaggggagaccggttataagattgaaggacaggtgccgaaaagacgaaggagatgtggagttaccctatgggacccaatgggttttggacattcgaacgccacaattctcagcttgctcgggatgcacagattagccaagtggccgggaggagggac

SEQ ID NO: 14967 - DNA, 261 bp, Glycine max
  Clone ID: 701069484H1
tggattttggagaaggatttgccagcttcaatatttgtccgagttcttgagtcaaggatggatcttttaaggggtgtgattattggagcagaagggatccttatcatgatggcctttcctttttggatgtttccttgcaaattgcctatcccaatgtaccgccgaaagtcactaccattctggaggtcttcggctcaacccaaatctgtatgtttgtggcaaagtatgccttagtctacttaacacctggtccggtagcaa

SEQ ID NO: 14968 - DNA, 264 bp, Glycine max
  Clone ID: 701069485H1
gtaaattgggtaaaacgggatgtcgatggttatgatcattccaccacaagctccaaacagcagatcacaggaaattataacattaccactggatcggggcagtctgaaacagaatcctcttccaatgtgaatatcagcgcaatacttgaggaggaagaagcactaattgctgctcataggaaggaaattgaggacacaatggagattgttcgtgaagaaatgaaactactggcagacgtggaccagccgggaagtcttattgac

SEQ ID NO: 14969 - DNA, 149 bp, Glycine max
  Clone ID: 701069486H1
gctagtttatcgtgaggagaatatgaagttgtttgtcttctctgttgctgcagtagttttcgtagcatggccatttcatggcgcaggctaccagaggttccctctccggaatgaaactgggtatggtgagcgttcttcggaggtaaatg

SEQ ID NO: 14970 - DNA, 258 bp, Glycine max
  Clone ID: 701069487H1
gctaagaagcttcagatcactaatacgacgacgcattacggaactaagggttgtgttgtgtcgtttcgttttcactctcacgttcttaaattttgtttgtgtatcgcaggaattcggatccgttatggggttctctgtaaccacgctaattttcgccgtgattggaattgtggcgtccctttgtaccagaatttgtttcaacagaggaccttccgctaatctatttcacctaactttggttcttactgcaacaacatg

SEQ ID NO: 14971 - DNA, 260 bp, Glycine max
  Clone ID: 701069488H1
tttcattctcattgccgtcacagagagagacaagaaacaatgaagtttaaccctagggtttcctcaagccgtcgcaagagccgcaaggctcacttcaccgctccgtcgagcgtgcgccgcgtcctgatgagcgcgcctctctccaccgatctccggtcaaagtacaacgtgcggtccattccggttcgcaaggacgacgaggttcaggtcgtgaggggaacctacaagggccgcgagggcaaagtggtccaggtctatcg

SEQ ID NO: 14972 - DNA, 105 bp, Glycine max
  Clone ID: 701069489H1
caaaagccattcgtcatgttcttggcggtggataaccggctgatgtttttctatggagcgtacaaggagatatccgcatcgacactcggatttgcgaccgctata

SEQ ID NO: 14973 - DNA, 253 bp, Glycine max
  Clone ID: 701069490H1
caagagtccaccaaagatcccacaagtgcacattccagaggaacctgttttaaaatttgcctctgctcttagaattgagatcaatcgggcttttgcggtgttaagggatattgcttctggaagggatctcaagaagttcttatcagtgattgctggattatgggtcttctctattctgggttgttgggccaacttcttgaccttgttctacatagcttttgttttgcttcacactgtgcctgtgctttatgag

SEQ ID NO: 14974 - DNA, 257 bp, Glycine max
  Clone ID: 701069491H1
cgaggcagtggttgcgtgggtgcgtgcgtctgagtgggatagacaagaaaacaatcgcggaaagggcgaaaccgatcgacttcgaactcaccttaaagcctttctatcagagagcctcagaagcagaggagcgcttatcaagactagaagcagccttgaatagtaaaaaaggtactggaaacgaggaaaacttgaaagtgattaatcatcttcagtcaaagttagaagttgcaaacgtagagttaatttctgaaaaa

SEQ ID NO: 14975 - DNA, 258 bp, Glycine max
  Clone ID: 701069492H1
cttcacttacctccatattgatttcaattattcttcatcacaattgctttgttacttttttgtttactcactcctttggttttgattgttgataagttaattaatctttgagaaatttgatgtttaaattgctagtttggtttagagagttcaattatagctgcggtttgtttgatcgttaatggttctgggaaacatgttatccaatctttcatgctagaaattggtgagttcggagtctgttgctatcattgtaac

SEQ ID NO: 14976 - DNA, 256 bp, Glycine max
  Clone ID: 701069493H1
tactaaacctaaaatcttctgccccacccagcattgtagcagagtgattctgttcactacaatgccatcatcactatcctctttcctccgtatggctcctattctctcccttctagtactctcatgtgtgatttgttctagtagtgctcagggatcaccttcacctggctactatcctagttctaaaattagtcctgttagttgttatcaagggtttagaaacctctggggatctcagcatcagagactagaccag

SEQ ID NO: 14977 - DNA, 263 bp, Glycine max
  Clone ID: 701069494H1
aaaacaccaaagacacccaaaacacccgttgttaagccaccagtcaccatccctcccattaatgttcctcccgttgttcttccaccaatagtgaagcccccaggtattgctcctccaattccaattataaacccacaaacaacaccagggaagggagggaacaactcaatgccaacaaccaaagtccttctgcgcaggctacgtgcccaattgacacgctcaaacttggtgcctgtgtggatcttcttggagggttggttcac

SEQ ID NO: 14978 - DNA, 260 bp, Glycine max
  Clone ID: 701069495H1
cgagataactagaaacagtgtgatgaaaatgaaggtccttgttttcttcgttgctacaattttggtagcatggcaatgccatgcgtacgatatgttccctctccgaatgaaaactggctatggtgcccgtactccggaggtgaaatgcgcaagttggaggcttgctgtggaagcacacaacatctttggctttgagaccattcctgaagagtgcgttgaagcaacaaaggaatacatccatggcgaacaatatagatcag

SEQ ID NO: 14979 - DNA, 263 bp, Glycine max
  Clone ID: 701069496H1
cctactttcacaacactgacctcaaagtaatctcttttctctcttatctctcattcatccatatatacataaacctgaacacccttttattttcacgtcccaaatcataatttccttacagcaacacaagcctacaattcaagttaatttcattagcaagcttgtttaatcctaaattttgttatggagatgaattcagatcctagtgttattatgtctgaggcagaatatgaagaagatactttctatgctgatattaggag

SEQ ID NO: 14980 - DNA, 276 bp, Glycine max
  Clone ID: 701069501H1
attagtttctcaggttggcttccccctccactatcgctctctccctaatcgcatctccaattgttgtcgtcggtgattaattctccctaatcaaaaccctaaacacgtcttaaattcaatctaataagagacacaacaaagctgttgattctgttgctaaacatagaacggtggacaaccgttacataaggctacagatccttgattcagttgaaagcagattgaaggggagtaaaacaggcacagagcaactgccgtaatagtcaatcgaggtgt

SEQ ID NO: 14981 - DNA, 281 bp, Glycine max
  Clone ID: 701069502H1
tgctcgttcgtcatttttcgtgcctcaaatctttacaatcgataaccacacccatcgcctttattcagaatgtcggaatcaccacccagaccacgagaaaagcttgctgagaagcaaaaatattttcagagtatccacaggcatacctacttgaagggacccatggataagattacatccgtggccataccactggctttggctgcaacgtcaatttacatgattggacgagggatctataatatgtcgcatggaattggaaagacagaataacctgggaa

SEQ ID NO: 14982 - DNA, 283 bp, Glycine max
  Clone ID: 701069503H1
ctcattaattgcaagaatggcacttcgttgcttggtgatgtccctttctgttctcttcactcttggtcttgcgagagaaagccatgccagagacgaagatttttggcatgctgtttggccaaacactctcattccaagttcattgtcagatcttctaaagcctggccctgcaagtgttgaaatcacatgatacccctatgcaaattgaagaaacacagtacccgaaaaccttcttctataaagactacttcatccaggcaaaacaatgaaagtacaattcagc

SEQ ID NO: 14983 - DNA, 281 bp, Glycine max
  Clone ID: 701069504H1
caacaagctgttgtctcttggcttcaagattgtattcttgtcaggaagatatcttgacaaaatggccgtaacagaagcaaacctaaagaaggctggcttccacacatgggagcagtcaattatcaaggatccacatctacatcactccaaatgcaccttcatacaaatcagcaatgagagagaatctgttgaggcagggatacagaattgttggaatcattggagaccaatggagcgatctgcttggagaccacagaggcgaaagcaggacctttaagctt

SEQ ID NO: 14984 - DNA, 277 bp, Glycine max
  Clone ID: 701069505H1
cgaccatgatgccggcctttcggacttcggcctcaaccccttgttcggaaacggagccccgtcaaaccgtgtggagggataccgggcacccgaagtggtcgaaacccggaaggtgagcttcaagtcacacgtgtacagcttgggagtgttgctgctggagcttctaacgggaaaagcgccaaaccaagcctcgctcggggaagagggcattgatctgtccaggtgggttcagtcagttgtgcgtgaagaatggaccgcagaagtgttcgatgcggag

SEQ ID NO: 14985 - DNA, 280 bp, Glycine max
  Clone ID: 701069506H1
caaatagtggaggacttccgtaactatgctgacttttgcttcaagacatttggtgatcgggtgaagcactgggtaaccctaaatgaaccacatggctacagcgtgaatggctacagtggtggaaattttgcaccaggtagatgttctaactacgttggaaaatgccctgctggtgattcttccaccgagccctacattgttaaccaccacttaatacttgctcatggagcagcagtcaattgctacaagaacaaataccaggctcatcagaaaggacaaa

SEQ ID NO: 14986 - DNA, 278 bp, Glycine max
  Clone ID: 701069507H1
taagtttcgttgccactgaggaatgaaatggccaatggtaacaacattagtcatttcttcaagctcttgcttttccttctaactttccactcttgtctcgatgagattttcttccaagagagattcgaagatggatggacgagccgttgggtgctatccgattggaaaaggagcgagggaaaagcgggtaccttcaagcacacagcagggaaatggtctggggatcctgatgacaaaggtcttcagacatataatgacgccaagcatttcgccatatc

SEQ ID NO: 14987 - DNA, 275 bp, Glycine max
  Clone ID: 701069508H1
aagaagtgcagttcccaaatggcaataatctttctttcaagctccgcaattcttcttccaactcttgctttctttctcacattatttaaccctgcaagtcccgaatcattcatcggcgtgaactacggacaagtcgctgacaacctgccgccgccgtcggcgacggcgaagctgctccagtcgacggccatcggaaaggtgcgtttgtacggaaccgacccggccataataaaagctctggcgaacacggggatcggaatcgtgatcggagcggc

SEQ ID NO: 14988 - DNA, 277 bp, Glycine max
  Clone ID: 701069509H1
ccttcaccttcccttcgagatggcaaagtctaagaatcacacagcgcacaatcagtcctacaaggcccacaaaaacggcatcaagaaacccaagaggcatcgccacacttccaccaaagggatggatcccaagtttctgaggaatcagaggtacgcgaggaagcacaacaagaagagcggcgaaattgccactgaggaagagtgaagtggcactttctaacggaaccattagggttttttttttaagctcggtttttttttgttttattttgttttc

SEQ ID NO: 14989 - DNA, 274 bp, Glycine max
  Clone ID: 701069510H1
gggggcacgaagggttctagtgacaggcacgggaccactgggttgcgtgccagcagaattggctatgcacagccaaaacggagaatgtgcgactgagctgcaacgagccgttaacctgttcaatcctcaactcactccaactactgcacgaacttaacactcaaattggctccgatgtcttcatttccgcaaacgccttcaccatgcatttggatttcgttagtaacccacaagcctatgggtttgtcacgtcaaaagtagcatgctgtggtca

SEQ ID NO: 14990 - DNA, 272 bp, Glycine max
  Clone ID: 701069511H1
cccattttgccccttcctcctttccttgtttccgaggagggccaaccacatatgctaaacaaggaaactaaattctaacctccttcagatctacaccacccttctcttttttttccagtttcataaattctacaccatgggcacgacaggttctacggccacaagattgtttcacccaccgcatcgctgttccaccggcggggttttcccggagaagaacctctgggacacacaacaacaattacttcaggggcacgcggaagccggttacc

SEQ ID NO: 14991 - DNA, 272 bp, Glycine max
  Clone ID: 701069512H1
tgaaccaaataccatagtcttctctttgtccgtgacaaaacagttcccacaaaaaaaagaaaaaagaaaaaagaaaagcactaaaaaaaaatgaagaagggtttctcccttgtgctgctgattcttctgatccagtacaacaacgttgtcaacgcctacaacaacaaaaactgtgtcacagaggattgcctcatcggcaacaaggatttggaatcagagttctactttggatcccatgtggccagaatgctctacgatgtgagccaatctgt

SEQ ID NO: 14992 - DNA, 273 bp, Glycine max
  Clone ID: 701069513H1
aggcgttctatatattattgaattgacaatgaggcctgctcttgctttgcttcctcttctatttgctttcttgttagctgccactacggaatcaagaaaagatccaggggaatattggaaaatgatcatgaaagatcaggacatgccagaaggacttcaaggtcttgtttcatttcaatctgaaaataaccctaagactcaagagcagcttggtaaaggttccaaaaaccattgtgaagagtctctagttacaaatacacaagttaacagtga

SEQ ID NO: 14993 - DNA, 275 bp, Glycine max
  Clone ID: 701069514H1
caaacacttcaactttaggctccatctcaaaaaaatgggtggtttagctagcaatcttcctctaattgttatggtgggtctgcaaattcattatgcagcacttgctatattcacaagagccgctttgttagatggattgagtacgacggtctttgtagtgtacaggcaaggcatagccactttggctttggcgcctatgtttttctctcctaagcggagacaatcagtgaaagattctttgggattcaggagcttctttttgatgtttgtgaccg

SEQ ID NO: 14994 - DNA, 264 bp, Glycine max
  Clone ID: 701069515H1
tcgtcgaggcgacgcaaaaagttgaaaataaaacaatagtctctcccgcgcccacacttggaccaatcgctatcgtaatggtattggtacgatgcgcttcgcctcttcaatgttgcgactgaggccgtgagagggccttgccaactcaagttgagattctacaaacatgatgcaacatgtaaagggtggctgggggcagacgtttgcgcttgctaaacacaatgaatccgaaggagaaagactcggattcgccgctcaaagcag

SEQ ID NO: 14995 - DNA, 282 bp, Glycine max
  Clone ID: 701069516H1
cgctttagcaaattccaattcccaatccaaaaccctaatttcgttcaaagaacaattgtgatggcaccaaaggcagagaagaagccagcggagaagaagcccgcggaggagaagaagtcgacggtgggagacaaggctccggcggagaagaagccgaaggcggaaagaagcttcctaaggagggaggagccggcggagaaggggggaagaagaagcagaggaacaagaagagcgtggagacatacaagatatacatattcaaggtgctgaagcaggtccacc

SEQ ID NO: 14996 - DNA, 288 bp, Glycine max
  Clone ID: 701069517H1
gcgaaacgacagccatcctatacgaaacgacggactctctaatgactaaatctctaaaacgctcgaaaccctaaaactgtgtcctccgccgttcacatcatcgtcgacgttcagttgctcacactctcaacaggtgagaagagagatgagaggaaggagctatagtccatcgcctcctccacgccacagcagaagaggaggaggagggaggagtcccagccccaggggccgctatcctccccgtcccagacaacaagatctccctaccagccttcttgtccgtaacct

SEQ ID NO: 14997 - DNA, 287 bp, Glycine max
  Clone ID: 701069518H1
gtgaagagtgagagagagagagagagagaggcacttggaatcccaaaatgagagaaatcatcagcattcacataggtcaggccgggatccaggttggcaactcctgctgggaactctactgcctggaacatggcatccagcccgatggcatgatgccaagtgactcctccttcggtgtagcccacgacgccttcaacaccttcttcagcgcaaccggatccggcaagcacgtccctcgcgccgtcttcgtcgatctcgagcccaccgtcatcgacgaagtccgttgt

SEQ ID NO: 14998 - DNA, 284 bp, Glycine max
  Clone ID: 701069519H1
gttggtaaagaaagaaagagaagagaagaatcgaagacgaagatggaggacgcatcagcatcaaagttcattccacaccaaatcggaggcgtccaaaacgacgcgcttcgattcggtctccatggagtcaagagcgacatcgttggttctcaccctcttcaatcttcactccaatctacaaggagaatggatgaagcgatgaagaggcaatgcaaagttaacctgtacggaactgcttttcccatgaaggaggagcttgacaggcaaatcctgtccaggttcca

SEQ ID NO: 14999 - DNA, 282 bp, Glycine max
  Clone ID: 701069520H1
ccctcttttgctttaccaaattccactttccaattcaaaaccctaactccgttcgaagcaccaaatcgtgatggcaccaaaggcagagaagaagccagcagagaagaagcctgtggaggagaagaaatcgacggtgggagacaaggctccggcggagaagaagccaaaggccggaaagaagcttccgaaggagggaggcgccggcggagaaggtaagaagaagaagagaaacaagaagagcgtggagacatacaagatctacatcttcaaggttctgaagca

SEQ ID NO: 15000 - DNA, 281 bp, Glycine max
  Clone ID: 701069521H1
cctaaaaagcgcaagaaaacaaaatccccaaaatatctctcgctctgaaaccgccatggatttgcagcagagcgagttcgatcgcctcctgttcttcgagcacgctcgtaaggccgcagaagccgaatacgagaagaaccctctcgacgctgataacttaacaagatggggcggagctttattagagttgtctcagtttcagagttttcctgaatcgaagaaaatgacccaagaggctgtttcaaagctagaggaggcgcttgcggtgaatcccaagaagc

SEQ ID NO: 15001 - DNA, 280 bp, Glycine max
  Clone ID: 701069522H1
gcttctcattgttgaaaagaaaccctagcaagtggagcaatggcagacgttgaagtcgatgtggcggcagcagcagcagcagggctgccgaagaagagaacgttcaagaagttcagttttcgaggcgtggatctcgatgcacttctcgacatgtccaccgatgaactcgtcaagatgttcagtgcccgcgctcgtagaaggttccagagaggcctcaccagaaagcccatggccttgatcaagaagctccgtaaagcgaaaagggaagctccaccaggtg

SEQ ID NO: 15002 - DNA, 272 bp, Glycine max
  Clone ID: 701069524H1
cagagagagcgaagaaaaaaaagacagccaaaccaaacctttcccgaaacggttcgttttgcccttcttcggaaccctcccttctgcgccgctgctgctgctccggtcgccgtcgggactctccggtaaccgaagaccactgccgatccgtcagaaacctcggatctcggatctgaacgagcgaaacgatgccgtctcacgcggattttcgacggcagatcgagcatctgatggagtgcaagcctctgccggagccgaggtgaaggcgctgt

SEQ ID NO: 15003 - DNA, 272 bp, Glycine max
  Clone ID: 701069525H1
tgagaaagtgagaatggagctggaggaacaaaaaatgaggcaatcaaggatgtttgtgagcgcaatccaagaagcaatggcgaagaagctgaaggaaaaagaccaagagattcagagaatggggaagctgaattgggcccttcaagaaagagtcaaaagcttgtgcatggagaaccaaatttggagggaattggcacaaacaaacgaatccacagccaactacctacgaagcaatttggaacaagtgctggcacatgtcggcgaggaacgcg

SEQ ID NO: 15004 - DNA, 233 bp, Glycine max
  Clone ID: 701069526H1
aagaaacccatcttcatgttacttacagtggagagaacacttttggggatctgacttcccattagcattattttaaagattggcactataatataattgctttctcattggccagtctcataaatttgtatcggtactcgatatcaaagaacattgctctcaatacaatgtacaggttgtatataaactctaagaagaacctgtataatgttaagagagcaatgttctttgat

SEQ ID NO: 15005 - DNA, 271 bp, Glycine max
  Clone ID: 701069527H1
aattcctcttcccattctaggcttcccaaatggacgctggcggaaagatcaagaagggcgccggatcgaagaaagggcggcggcactaagaagaagccggtttcaacgtccgtcaaggccggtctccaattccccgtcggaagaattcttcgttatttgaagaaaggaaggtacgcccagcgtgtcggtaccggtgctcccgttacttggccgcagttctcgagtacctagctgctgaggtgcttgtcctggctgggaatgctgcacgtga

SEQ ID NO: 15006 - DNA, 270 bp, Glycine max
  Clone ID: 701069528H1
gagggttgcccttggagaatgtgggagagtttggaaaaggccaagaaagagttagcagcaagcattgagaagggcatttctttcatcagaaaatgagtagttgatgatagtacgtcccgaaaataaatggttagattgtgctgtgtccattgtgagatcatatagatttataattagttatgtgatatgtatgaatatcgagttctatctagaaacatgtaaatgtaataattggaataccgaatttcatttattattccgtctcgagtt

SEQ ID NO: 15007 - DNA, 273 bp, Glycine max
  Clone ID: 701069529H1
agagagagagagggagtcagagaaaccctaggtaagaagaaaagatgccggctggtcatggtttgagatcccgcaccagagattccttctctcgtcctttcaggaagaagggaaccatcgccctcaccacatacctgagaacctaccacgtcggcgactatgttgacgtcaaggttaacggtgccgttcacaagggaatgccccacaaattctaccatggccgcaccggacgcgtctggaatgtcaccaaacgtgctgttggcgtcgaagtca

SEQ ID NO: 15008 - DNA, 278 bp, Glycine max
  unsure at all n locations
  Clone ID: 701069530H1
gcggaaatcgttgttgagttcacagacttacccgtcaagaggccaagagaagaagaagaaggaaccaatggcgtctccaacgacgccgtttcagcgctccccaatgaccctcaataccctggcatctctgcggttattcccggttggttctccgaaatcagcccaatgtggcccggggaggcacattccttgaagatggaaaagattttgtttcaagggaagtctgactatcagaatgtcatggtcttccagtcatcaacatatacaanagttcttgt

SEQ ID NO: 15009 - DNA, 275 bp, Glycine max
  Clone ID: 701069531H1
atcagactgctaaggcagctctagagatgggtgcttcattggctcctggagattctaaatttactgatttgatcaaagactgcgatgaactgattgcagaagaatctggtgtcatacccatacaagaacgagagcacaacacagggtgctgctacaaaagctgttgaggcagagaatgatcttccagagccacctacagtaaccgtggttaaacctaaatacaggcatgaattctaccagaaacctgatgaaatggttattaccatatttgcaaa

SEQ ID NO: 15010 - DNA, 280 bp, Glycine max
  Clone ID: 701069533H1
cccaattcctaattgtttaaacctaattctcatttcttcatcgttcgattcttctcactctaaagatgcagatcttcgtgaaaactttgaccggtaagaccatcacccttgaggtggagtcctccgacaccatcgataacgtgaaagctaagattcaagacaaggaagggatcccacctgaccagcagagacttatctttgcgggtaaacagcttgaggatggtcgaacccttgccgactacaacatccaaaaggaatccactctccacctcgtgcttcg

SEQ ID NO: 15011 - DNA, 281 bp, Glycine max
  unsure at all n locations
  Clone ID: 701069534H1
agagtttgttgtgagctataagctagtttatcgtgaggagaatatgaagttgtttgtactctttgttgctgcagtagttttggtagcatggccatgccatggcgcaggctaccaaaggttccctctccgaatgaaaactggctatggtgagcgctcttcggaggtaaaatgcgcaagttttaggcttgctgtggaagcacacaacatccgagccattaaaaccattcctgaagagtgcgttgaaccaccacangactacattaatggcgaacaatttagat

SEQ ID NO: 15012 - DNA, 281 bp, Glycine max
  Clone ID: 701069535H1
cacacactgaaatgagcaatttccagagaatatcgcacgaatcctaccctcccccagggcacggatctccttaccctccaccccaaccgggttacccatcggcgccgcctcatgaacggtaccctccgccgccgccgcctccgggatatggtgggtaccctccaccgcatccgccgcagcgtccgccgtatgactcctaccagggctacttcgacaacgggcgtccaccgccacctccgccgccgcactaccattaccagcacgtggatcatcatcacctc

SEQ ID NO: 15013 - DNA, 279 bp, Glycine max
  Clone ID: 701069537H1
aaaccctagttagcctcttcttgtttctcctgcaatcaacgacacccccccaaaaatgacaggagagacagtgaacccaaaagcttaccctttggccgatgcgcaactcgcaataacaatactggatcttgtgcaacaagctgccaactacaagcaactcaaaaagggtgctaatgaagcgaccaagacactgaacagaggcatctctgagttcgttgtgatggccgcggacactgagcctcttgagattcttctccatcttcctctcctagctgagga

SEQ ID NO: 15014 - DNA, 269 bp, Glycine max
  Clone ID: 701069538H1
ctcgagccggtcaccatagtgactttcttctttgaaccaaaatctaatagtgatgctgatcccaaggcagcaaggcgagctctggactttatgtttggctggtttgctaatcccattacatttggtgactatcctgagagtatgagatctttagttggttctagactccccacattcaccaaagctcaatctgaaagtctcaaaggttcatatgattttactggtataaattcattacacctcaaatttcgtggaatatgctccaccaa

SEQ ID NO: 15015 - DNA, 277 bp, Glycine max
  unsure at all n locations
  Clone ID: 701069539H1
ctcaagcaagctaaggcattattatggcttatcaagtgttgctaatttgtttggtctccaccatagtgtttgcatacatactatggagaaaacaaagcatgaaaaaccttccaccaagtctaaaggtacaatnncataattggccaactcaaacttgtgtcnccaattccccatgaagattgttacaagntntnaanacgccacggacccatcatgcaacttttccttggctcagtcccttgtgtggtggcttccaccgcagaagccgccaaagagt

SEQ ID NO: 15016 - DNA, 274 bp, Glycine max
  Clone ID: 701069540H1
gcaatcacacacacacccaagcgaagaaggtaagttcccgttacagagatagaaaaaacagaacaaaacaaaagaaaaagaagaaaagaatgggttatgtttctatgaaagtggttctaatctccaccggggttttatccatggcaatgggtttgaaactcacactccctttgctctcgcatttcctcctcaaccaagcccctcacgtgtggaccttcctcctcacgtgcttcactcccccttacctctacatccttctcaacttcatcatcct

SEQ ID NO: 15017 - DNA, 254 bp, Glycine max
  Clone ID: 701069541H1
cttattttctctggcccccaccatgtcttctatgtaatatttgttgccctcttcccccaagtatatgacaaggttgggtttctttttatccacgcctgtgcccgttatcacttgctatggataattgaaatccggtgagagtgagaagtggggttggcttggtgggtgggtgggtggatgaatgatgtctcttgcttaatatgggaccacttttcttcctcaataatgcacatattctagtgttgtccatttac

SEQ ID NO: 15018 - DNA, 270 bp, Glycine max
  Clone ID: 701069542H1
caccagccaaagctgggcgtttgactaatgcgtatgtatcatctttccctgctgctcctacatttgtcaggtctccatcacacgggcaatacccagctgctcttccaccatacccttccccaccccacatgtacggcagcagaagtcccccagcaaatccttatgctgcttattcacccgagccggcaccagctattgcagggtcttacccggcagctcccatgaactatcctcatgcatatggcggctatggaaatgttttggctccca

SEQ ID NO: 15019 - DNA, 264 bp, Glycine max
  Clone ID: 701069543H1
cgcaaaaatggcacctgcaacactgtctctgtctctcctcctcctgttctcactcagcatcgccgtaaccgttagatcgagcgactacgactacgattgtgtgtacactgcatacgttagaaccggttcggtgttgaagggcggaacggactctaagatcgggctgaagctgtacgacaagtacggctactacatctacattaaaaacctcgaagcatggggcggcttgatgggcaagggctacgactacttcgagcgcggcaa

SEQ ID NO: 15020 - DNA, 264 bp, Glycine max
  Clone ID: 701069544H1
gcatgtgccaccggagccagcgggccgtcggatcatgggtggtcctactcctcctccagcgtggttacaccgtccatgccaccgcccaagctatccaggatgaaaatgagacgaaacatttggaggaaatggaaggagcaaagagtcatctccattttcctgaaatggatcttcttgacatcgactccattgccgctgccataaagggctgttccggcgtaatccaccttgcatgtcctactatcattggtcacgtcgaagatc

SEQ ID NO: 15021 - DNA, 194 bp, Glycine max
  Clone ID: 701069545H1
tctgcgttcggctcgaggttcactcttattctcgatgcggatatggcctcagcgctttccttgtagcattcaatgacgatcggtcaggttacggttcacaacagtatcgtggtcattggccatgtcgaatctgggaattcctctctcactggtctcctgatgtggaagatccgatggtttgataggcgtgttat

SEQ ID NO: 15022 - DNA, 273 bp, Glycine max
  Clone ID: 701069547H1
gaaggctggctaccacacatgggaaaaattaattctcaaggatccacaagatccttccactccaaatgcagtttcatacaaaacagcagcgagagagaaactgataaggcagggatacaacattgttgggatcattggagaccaatggagcgatctcctcggaacccacagaggcgaaagcaggacctttaagcttcctaatcccctgtactacattcagtagttccttcacctctcaacaatctagcttgctcctatctatctatatgtaat

SEQ ID NO: 15023 - DNA, 289 bp, Glycine max
  Clone ID: 701069548H1
ttcggctcgatgagtctgttgtgagctataagctagtttatcgtgaggagaatatgaagttctttgttctctctgttgctgcagtagttttggtagcatggccatgccatggcgcaggctaccaaaggttccctctccgaatgaaaactggctatggtgagcgttcttcggaggtaaaatgcgcaagttttaggcttgctgtggaagcacacaacatccgagccgttaaaaccattcctgaagagtgcgttgaaccaacaaaggactacattaatggcgaacaatttag

SEQ ID NO: 15024 - DNA, 282 bp, Glycine max
  Clone ID: 701069549H1
ggttgctatcagcgagtgagagtgagtgagtggttctcttgcagcaacaaggtttagtgacaccaaacagacgggaaatgggtcgtggggtcagtgctggtggtggacagagttccttggattatctctttggcagtggggtacctgccagcagtgcaaatggtgctcgcactcaaaatgcaagtgctccttcaccaccggttgaacaagcaaagtccagcaccagcaccagcaccagcacctgcacctgcagcagcagcagcaccagcacctgcaccagca

SEQ ID NO: 15025 - DNA, 281 bp, Glycine max
  Clone ID: 701069550H1
gcacagctacctgcatcgacatcctccttgccatcatcctccctcctctcggtgtcttcctcaagtatggatgcaacgtagagttctggatctgtttggtgcttactctttttggttacattcctggaattatctatgctgtctatgctatcaccaagtgatcatattcatcacctcttgtagacaatgaataatttgtcaaagtacaacggttatgcatgtttctcaactccagcattgatataatcgtttgatctcagaacaatgtgattcttttttgt

SEQ ID NO: 15026 - DNA, 278 bp, Glycine max
  Clone ID: 701069551H1
tgtcgcgttgtgttgcgtcgtgtcgtgcgctgttcctctgtttctcgtttttgtgttcagaccgaaccctagctccgcatcgcaaccatgtcgaccaagcaaggtggaaaagctaagcctttgaagaaacccaagtctgataagaaggattacgacgagattgatgtggctaacattcagaagaaaaaggaagaggagaaggcgctaaaggagttgaaagccaaggcgcaacagaagggaagctttggaggttctgggctcaagaaaagtggaaagaa

SEQ ID NO: 15027 - DNA, 277 bp, Glycine max
  Clone ID: 701069553H1
ctagttgctagctatgggggaattcaagcactttgtaattgttaagttcaaggaaggtgtggcagttgacgacctcactaaagggatggaaaagttggtctcagagattcatgctgtcaagtcctttgaatggggacaggacattgaaagcctagatgtgttgagacaaggattcactcatgccttcttgatgacattcaacaagaaagaagactttgttgcatttcagagccacccaaatcatgtcgagttctcgacaaaattttcggcagctatt

SEQ ID NO: 15028 - DNA, 273 bp, Glycine max
  Clone ID: 701069556H1
atttactctctctctgatctgaaatctgaatgattgaattgcgttgcagatggtacaccatgactcttgctgacggatctgtttccgagacattccattatttaaggcagaatgggttgcagggtttgctacatatatggcccacccccactcccaccgcctgcaaaatcattgcagtctatgctgcatttgaggcagcacttcagcttcttcttcccgggaaaaccgtttacggccctatttctccaaccggccaccgacctgtctacaagg

SEQ ID NO: 15029 - DNA, 272 bp, Glycine max
  Clone ID: 701069557H1
gcagaactcaactgtgttcccacttggggaacaacctaggagcagtcccgccacagccacgcctcccataaaacttctgacaaggatggagcagctgaagctgctgaccaaagcagagaaagcagggttgctatctgcagcagagaagtttgggttctccctctcaacaatagagaggcttggactcctctcaaaagcagaagagttgggtgtgctatctgctgccactgatcctggaactccagggacactcttaaccctcagcttagggt

SEQ ID NO: 15030 - DNA, 266 bp, Glycine max
  Clone ID: 701069558H1
gtgagagcaaaatcaaaatgtgggcaagcgcagaaggtggtgctccggaggttactctggaaacttccatgggttctttcaccgttgagctgtactacaagcatgcgccgaggacttgtaggaacttcattgaactgtctcgccgaggttactacgacaacgttaaattccacaggatcatcaaggacttcatagtacaaggtggggatcccactggaacaggaaggggaggagaatccatatatggtgcaaagtttgcagatgag

SEQ ID NO: 15031 - DNA, 273 bp, Glycine max
  Clone ID: 701069559H1
cggctcgagcggctcgagggcgagtaccctgaggcttctcttctcttctcttctctgtcgtgagtcaccatggtgagggttagtgtgctgaacgatgctctgaagagcatgtacaatgctgagaaaaggggaaagcgccaagtcatgattaggccatcctccaaagtcattatcaaattccttttggtgatgcaaaagcacggatacatcggagagtttgagtatgttgatgaccacagggctggtaaaatcgtggttgaattgaacggtaga

SEQ ID NO: 15032 - DNA, 268 bp, Glycine max
  Clone ID: 701069560H1
cacaagccaagtgaaagtcagaaaaaataaaaatcaaagagcataatgtcagggatcattcacaagattggggagacccttcatgtgggagggcacaagaaggaggaggagcataagggtgagcaccatgctggagaatacaaaggggagcaccatggtgaacacagtagtgagtacaaaggagagcatcatggtgaacacaaagctggagagtaccatggtgagcacaagccagagcacaaagacgggttcctagacaaagtcaagg

SEQ ID NO: 15033 - DNA, 224 bp, Glycine max
  Clone ID: 701069561H1
gactactagaatctacttcagattcttgttcttgtggtctgttttctgttgtgtttgatgttcagatgtgtaccagtaccgatgtggttttaatttggatgcattgcttttatgcttcaaaaaaaaaaaaaaaaaaaaaaaaaaaaaaaaaaaaaaaaaaaaaaaaaaaataaaaaaaaacaagcaggatgttatcgcgcaataattgtcagatcccccccccc

SEQ ID NO: 15034 - DNA, 278 bp, Glycine max
  Clone ID: 701069564H1
ggaagcagtggcgccaatggtgaagttgggttcttacggtggtgaggttcggttggtggttggtggggaggaatccgctgcggaggcgaccatgctgctttggggtattcagcagcccacactttccaaacccaatgccttcgtctctcaagcttccttgcaactctccctcgactcttgtggccactctctctccattcttcaatccccttcctcattgggaacgcctggagtcactggagcagtgatgtgggacagtggagttgtactgggaaagt

SEQ ID NO: 15035 - DNA, 281 bp, Glycine max
  Clone ID: 701069565H1
cattcattcaatttctttcttcgcttcacgcattacatcatatcatataaccctttttcgatccttcttcttcttcttcttcttttctctacaatgccacaaccactcaccttttccttctctccttgaatgctgttttcccttttctgcgccatgcccttcctcttcctcttccttctgcttctctgtacacttgaatcccatagcagtaatcatcttcaaggtcctgtaagactggatagccatgtgggtactatgttccccaaaccctcacctcttgg

SEQ ID NO: 15036 - DNA, 278 bp, Glycine max
  Clone ID: 701069566H1
aagcagatcaatctctctctctctctcaaccataatagtcatgggtttgaaggaggattttgagcagtatgctgagaaagcaaagactttgccaccgactcaatcaaacgaagacttgcttatcctttatggattgtacaaacaggccaccgttggacctgtcaacaccagccgtcctggaatgttcaacatgagggacagagctaaatgcgatgcatggaaggctgttgaagggaaatccaaggacgaagcaatgggtgattacatcattaaggtga

SEQ ID NO: 15037 - DNA, 104 bp, Glycine max
  Clone ID: 701069567H1
gtaaaacagattgatttgagatatagatggcaattttcccttgtgattatcttgtagaatttataaatcatttttctgttatccattttcattttattgcactc

SEQ ID NO: 15038 - DNA, 272 bp, Glycine max
  Clone ID: 701069568H1
ctccttctcaaactagttctatatactattattcatccattccattctatatatttcataatgggtgttttcactttcgaggatgaaaccacctctcctgtggctcctgctaccctttacaaagctctagttacggatgctgacaacgtcatcccaaaggctgttgacgccttcaggagtgttgaaaacgttgagggaaatggtggccccggaaccatcaacaagatcactttccttgaggatggagaaaccaagtttgtgttgcacaaaat

SEQ ID NO: 15039 - DNA, 272 bp, Glycine max
  Clone ID: 701069570H1
agtcaatagaacatcttgcatctcaactgaagctaaaaaagtttctagtcagagcatggacagcaatggggaatgtgatttcatttctgattctgattctggatctgctttacttctccttgggactgttcaaactgctgaattgtcagaacacgataatcctagaaatccctttaaaagctcaaaaagacataacaataagtttactgagcatttgggtgcccagtgggatgtctttcgcagacaagatgttccaaagctcatcgaatacc

SEQ ID NO: 15040 - DNA, 271 bp, Glycine max
  Clone ID: 701069571H1
tgagagggacggtagcagagattccgtgagttgcaaaaatgaaaacaattcttgccgcagagaccatgaacatcccggacggcgtgagcctcaaggttaatgccaaggtcatcgcagttgagggcccccgcggaaaattggtgcgagacctcaagcacttgaatctcgactttcagctcatcactgacgaaaacggtaaaaggaagctgaaggtggaggcctggttcggttctcggaaaacatccgccgccattcgcaccgccctgagcca

SEQ ID NO: 15041 - DNA, 258 bp, Glycine max
  Clone ID: 701069573H1
aaacacaagccaagtgaaagtgagaaaaaataacaatcaaagagcataatgtcacggatcactcacaagattggggagacccttcatgtgggagggcacaagaaggaggaggtgcataagggtgacaccatgctggagaatacatggggaccaccatggtgagcacagtattgagtacaaatgagcgcatcctggtgaatccacagctggctacctacatggtgagcacaagccagtgctcgcacaggggttcctaga

SEQ ID NO: 15042 - DNA, 262 bp, Glycine max
  Clone ID: 701069574H1
gttgagggttgtgttggaatttttcacactgacaccccaattgatttcgcggtgaacgacccagaggaagtggtgaccaaaagacgcattgatggagcactaggcatattgaaagcacgcctaaaaggcaagactgtgtagagggctgtttacacttctaacggacccactgcttgcttcagcagcctagaagagacaggatgtggccgatgagactgattggagtgatgcggatttgctcaggcgtctgaagccttttagc

SEQ ID NO: 15043 - DNA, 154 bp, Glycine max
  unsure at all n locations
  Clone ID: 701069575H1
gcgcttcagcacaatgggtgcctacaagtatgtttcggagctatggcgcaagaagcagtctgatgttatgagattcttgcagcgggtgaggtgctgggagtatcgccagcaaccttctattgntccgtttgcacaacggtctaactcgcccaga

SEQ ID NO: 15044 - DNA, 264 bp, Glycine max
  Clone ID: 701069576H1
gtaattaataacaagctagctattagttcgattttgtagtaagtgaggtgccaatatggtgaagatagctcttggtactttggatgactcttttagcgctgcctctcttaaggcttatttcgcagagttccacgcaactctgatttccgtgttcgctggtgttggatcagccatcgcttacaacgagcttacaaaagatgcagccttggatccaacggggctggtggcagtagctgtggcacatgcatttgcactgtttgtagg

SEQ ID NO: 15045 - DNA, 271 bp, Glycine max
  Clone ID: 701069579H1
ctttgttaactccactaagtaaaggtgataccacaacattagaggtcgtttacatattgacacattctctggaacctttcccagtagaaataagtcaatcagagtcacagttggtttatttccgtgatagtgcaatattattgtctccctatcatgtcaatcaacagacaacttttattaagactccaagcacccgggtagaatcattcacagtggtggaccccactaaacgtgctggtacagagttgaaatacgggccatatgaaaatca

SEQ ID NO: 15046 - DNA, 277 bp, Glycine max
  Clone ID: 701069580H1
cacaattcctacacatttctactctttagtttctccaattttctttctcaattctcaacaatggccactacaacacaacttcacttaccccctggattcagattccatccaacagatgaagcactcgtcatccactacctttgtcgcaaatgcgcttcgcaacatatcgcggttcccataatcgccgaaattgatctgtacaagtacgactcttgggaccttccaggaatggctttgtacggagagaaagagtggtattttttcacgccgagggacc

SEQ ID NO: 15047 - DNA, 211 bp, Glycine max
  unsure at all n locations
  Clone ID: 701069582H1
gtttttatacaaacctcatgtaggtgggagagagagtgtctttcttggatcatagcatagcatcactatggctcttctgagtcgagcctcttcacgcttccctcagctggtttcccctcaaagagttgtttccctccacacaacgctcgcatcgcttaangcattaacatctacacccaggccgggccatatgccccgccaccgcctgcgt

SEQ ID NO: 15048 - DNA, 273 bp, Glycine max
  Clone ID: 701069583H1
atcaaacatggctagggttagtgctttgtttcactctttgctcttgatttcttcccttgtattggcttctcaaatccatgtttcctctgggaaactagtccctggactatcatggaattactatttgttgacatgtcccaagcttgagaggattataaggaagcatcttgaggatgtcttcgagaaggacagtggagtagctcctggcatacttcgactcttcttccatgactgctttcctaatggatgcgatgcgtctatattgttgaatgg

SEQ ID NO: 15049 - DNA, 190 bp, Glycine max
  Clone ID: 701069584H1
cacaaacagagcaaaactcgctccaccaatggcgggttacagagccgacgacgactacgactacctcttcaaggtggtcctgatcggcgatcggcgtgggaagtcaactcctcctcgctcacagacgatcattgatcagtcacatgcgcgatccacgactgcgcgatcaatcatagcaactggacgagca

SEQ ID NO: 15050 - DNA, 274 bp, Glycine max
  Clone ID: 701069585H1
attcagttcagtaactcacctcaccatggccgcatccattacattgtccaggctcgtctcttccaccctcaccactgcctatttcttcccacccataaccctgccttccaaactctcctctctccgactccccacccgccgccaccccaagccactcagattctcctcctccaccatcaccgccaccatctccgtcggcgacaagctcccggaggccaccttctcctacctggactcgtccggcgaggtgcagacgacgacggtgtcggaactg

SEQ ID NO: 15051 - DNA, 270 bp, Glycine max
  Clone ID: 701069586H1
gctgtctgctgttagatctgtacccgcctagccattgatttggaaaagtccaacttcaaggatgagtaagcttcagagtgatgctctaagagaagctatctcaggaatcatggctgattccaaggaaaagaacaggaaatttgtggagaccattgaactccaaattgggttgaaaaattatgatccccagaaggacaagcgtttcagtggctctgttaagttgcctcatattcctcgccccaagatgaagatttgtatgcttggagatgc

SEQ ID NO: 15052 - DNA, 269 bp, Glycine max
  Clone ID: 701069587H1
cctcgagccgaatcggctcgagtagcaagctagctaggttgaaaatactttggttctgtagtacgtgaggtgaggtgccaaaatggtgaagataactcttggtactttcgatgactcttttggtgttgcctctcttaaggcttatttggtagagttccatgcaactctgacttccgtgttcgctggtgttggttcagccatcgcttacaacgagcttacaaaagatgcagccttggatccaacggggctggtggcagtagctctggccc

SEQ ID NO: 15053 - DNA, 269 bp, Glycine max
  Clone ID: 701069588H1
ctcaatttctctccctccctctcaacacattttcccgggccgggtcgtgcattctcggagcatcgccggaatcctttccgaccgaaaaagaaaaataatgacgggatccctcgcggcaaggctcgtccttcgtcgttgccgatcgccggcaagtcaattcttcttccgcagggaagcctcctcgacggcgacggagcgaacgacaaatgacgtcgttacgtcgccgccgaaggaattgacggcgttcgactactctccgcccgcgtact

SEQ ID NO: 15054 - DNA, 266 bp, Glycine max
  Clone ID: 701069589H1
ctttggattcttattgttcatcgcagactcaacactctctccagacacttccttcatcaaatggcttctcacgacggcatctccgctgcttcttcagattccgtcttcaatcacctcgttcgtgctcccgaagatcctatcctcggggtaactgttgcttataacaaagatccaagtcctgttaagctcaacttgggagttggtgcttaccgaactgaggaaggaaaacctcttgttttgaatgtagtgaggcgagttgagcagca

SEQ ID NO: 15055 - DNA, 262 bp, Glycine max
  Clone ID: 701069591H1
atgggattttagagcgtatgtggttttggttggtaactgaagagtgtgtggaggaagaagaaggaatcggcggtgttcaactgacgatcgcatctcaaagtttggtcacgatcgttgctttgcttgttcgacatttttttcccttttggtttttctgaggcattttcttagttgtatggttgtttgtgttgttttctcgctgctgaaattatatatgggctaagggggcacttttcatgggaggtgtggaagatgaagaacc

SEQ ID NO: 15056 - DNA, 261 bp, Glycine max
  Clone ID: 701069592H1
gagaattggctttctcttctctctctctctctctctctctctctccttctgccaaccaacttctgctccctttttctgcaatgggttgtgctggatcttcacaatccaagcctgatggggcagtaaaaaagatccggaaacctaagccttggaagcatcctcagcccataacaaagactcagcttacacaattacgtgatgagttttgggatacagctcctcactatggtggccggaaagagatttgggatgctcttcgag

SEQ ID NO: 15057 - DNA, 268 bp, Glycine max
  Clone ID: 701069593H1
caagtttgacagcatctgatacaatcacggacatttgtagtggatctggttcaatcacagttgatcagttggttggtaccttctcatctgatcctagtttgattgcttttgcacaactctgctgtgacccctcttggtataatagatctgatgttgatttcaaggaattctgcttgcaagtattatttgagcgtgtgaccaaggatagaccagctctgttacaggtaatgtgcttagaaggttaatttgtatttcctaaattcaataa

SEQ ID NO: 15058 - DNA, 270 bp, Glycine max
  Clone ID: 701069594H1
gtgcaatatcaaaattgcataaggagatagtaccagagaaatgtaaggttgtggtcaagcctaaaagggcaatcatcacgtcggtgaaggcttccaaaggaaactggctagatttgcacttcaaagaagacaagctaaagccaaatctggataaggagaaacacccaatggcaggaatcatggacatgatgaggaacatgtatgaggatggggacgaagagatgaagaaaaccattgcaaaagcatggactgatgctagatctgggaaaa

SEQ ID NO: 15059 - DNA, 275 bp, Glycine max
  Clone ID: 701069596H1
ctggagaaagagaaagatgatgaggttaaggtggagtttagtcgtaacggtcacgttcgctgttttgctgttttggattggatcgctgcaagttcaagcctctaattctgtttccgccttcgttcaaaacgccatctactccaacagaatcgccgttttctccaaatcctattgcccctactgtttgcgcgccaaacgcttgcttgctgagctcaatgagaaaccgtttgtggtggagctcgatttgcgagatgatgggtatcaaattcagagtg

SEQ ID NO: 15060 - DNA, 275 bp, Glycine max
  Clone ID: 701069602H1
attctctctgtgtatttccctacctctcccttcaagatgcagatcttcgtcaagaccctcaccggcaagaccatcacccttgaggtggaaagctctgacaccatcgacaacgtcaaggccaagatccaggacaaggaaggaatccccccggaccagcaacgtctcattttcgccggaaagcaacttgaggacggccgtacccttgctgactacaacattcagaaggagagtactcttcacctcgtcctccgtctccgtggtggcatgcagatctt

SEQ ID NO: 15061 - DNA, 269 bp, Glycine max
  Clone ID: 701069603H1
gtgatcaatgtctacagaggaagagagtgcggtgaaggagcctttggatctcattaggctcagcctcgacgagcgtatctatgtcaaactccgttccgacagagagcttcgtggcaaacttcacgcttatgatcagcatcttaatatgattcttggcgatgttgaagaaatcattactacagtggaaatcgatgatgagacatacgaagaaattgtgaggactacaaagcggacagttcctttcctgtttgtcaggggagatggggtga

SEQ ID NO: 15062 - DNA, 271 bp, Glycine max
  Clone ID: 701069604H1
ctgctgccgaaacccttccggaaccctaaggtaagtgagtaatcagcggttgagaatggtggacaaggcgaagggtagaaaggaggaggtggttacacgtgagtacaccattaacctccacaagcgcctccatggctgcacatttaagaagaaagctccgaaagctattaaggagataaggaaatttgcccaaaaggccatggggaccaatgatgtgagggtggatgtgaagttgaacaagtttgtctggagccagggaatcaggagtgtt

SEQ ID NO: 15063 - DNA, 269 bp, Glycine max
  unsure at all n locations
  Clone ID: 701069605H1
cggcggcaacagggagagaagatgaagttcaatccacgtgtgtcgagcagccgccgcaagagccgaaaggctcatttcacggcgccatcgagcgtgcggcgggtgcttatgagcgcccctctgtcggcggagctgcggtctaagtacaacgtgaggtcgatccgcacntaggaaggaggacgaggtgcaggtgatgcgaggaacatacaagggtcgcgaggggaaggtgactcaggtctaccgtcgaaagtgggtgattcacattgagc

SEQ ID NO: 15064 - DNA, 269 bp, Glycine max
  Clone ID: 701069607H1
gcaaaaggccatataattttcttttatttgaaataatgtccgggatcatccacaagattgaggagaccctccatgtgggagggcacaagaaagaggagcacaaaggagaacaccatggtgagcacaaaggtgaacacacaggagaacaccatggtgagcacaaaggtgaacacaaaggagcacaacaccatggggagcacaaggagggacttgtggataagatcaaggacaagatccatggtgatggccatgacaagggtgagaaaaag

SEQ ID NO: 15065 - DNA, 268 bp, Glycine max
  Clone ID: 701069608H1
ttcccttctccaacatgccaaacgacagcgttctgagtcttttcttcttcgtcaccctcttcacatgccttctctctgctaattcccacgatgaccatattttcctaccgagtcaactccatgacgatgactcagtgagttgcactgctaccgacccaaaccttaactacaagccggtgatcggaatcctgacccaccccggcgacggtgcctctggccggctcagcaacgccaccggggtttcttacatcgccgcctcctacgttaa

SEQ ID NO: 15066 - DNA, 271 bp, Glycine max
  Clone ID: 701069609H1
gaatttccattgtcaagttctccacgttttgttttgataacaacaatctcgttgtggttttccaatgctgcgagcgcagtcgaagatctagctagaggcagagaacgttctcttctccctgatcctctggaaagttcttagccgatggcgatcttctaacctttggtggccagaggcacggtggtgctggcggagttcagcgccgtcaccggcaacaccggcgccgtctcccgccgcattcttgagaagcttccggcggagtccgactcca

SEQ ID NO: 15067 - DNA, 259 bp, Glycine max
  Clone ID: 701069611H1
gtccggcagtggaacaacatgtaatacgtttcaacagcagcatttctgctctcaatatactctgatttccttcaaaacacagatcaaaagcttaattgccatggcggtacagtggaccatgaagaaattcttaattttgctaagtcacaggttgattacattttggcggtcaacccaatgaacatgagctatttagttgggtatggccctaactaccctaaaagggtgcaccatagaggggcatccattgtgtcataca

SEQ ID NO: 15068 - DNA, 268 bp, Glycine max
  Clone ID: 701069613H1
ggagtagcggcattaaaaatgcagatcttcgtgaaaactctgacagggaagactataaccctcgaggtcgagagcagcgacaccatcgacaatgtcaaggccaagattcaagacaaggaaggcatccctccggatcagcagcgtttgattttcgccggaaagcagcttgaagatggaaggaccctggccgattacaacatccagaaggaatcaacccttcatctcgtcctcaggcttcgtggtggcatcattgagccttccctcatgg

SEQ ID NO: 15069 - DNA, 267 bp, Glycine max
  Clone ID: 701069614H1
cctccccttctcttgcggctagggttttagcgcacttcttctagatttaaggaagatcggtaaggaaaaggttcacatcagtattgtggttattggccatgttgactctgggaagtccactaccactggccacctgatctacaagcttggaggccttgagcagcgtgttattgagagatttgagacggaagctgctgagatgcacaagaggtcttccaagtatgcctgggtgcttgataagcttaaggctgagcgtgaaagaggaat

SEQ ID NO: 15070 - DNA, 259 bp, Glycine max
  unsure at all n locations
  Clone ID: 701069615H1
ccaaatcctcgatctcgccgaacaaccccaccttttcaaaatccgattttccgatgccgaagaagcgaaagtctatcgccaccagtctcgacgaggtggatcgaaccctctacgcgtcgttttgcaccgccgccaactccctctcgcagctctacacgcactccatgtaacaccagacgntctccttcaacgtcggggcccgacacgccctcgtctaccttattcgtggattcttcgacaacaagatggaggatcacgg

SEQ ID NO: 15071 - DNA, 272 bp, Glycine max
  Clone ID: 701069616H1
aggtagaacccttccacggtggtgactgcgcgatgggtgcctacaagtatgtttcagagctatggcgcaagaagcagtctgatgtcatgcgcttcttgcagcgggtgaggtgctgggagtataggcagcaaccttccattgttcgcttgacaaggtcgacccgccctgacaaggctcgtcgcttgggcttcaaggctaagcagggctatgtgatataccctgttcgtgttaggaggggtggccgaaagaggccagttcccaaaggtattgtt

SEQ ID NO: 15072 - DNA, 275 bp, Glycine max
  Clone ID: 701069617H1
gtaaattaactatgaagcctaccctactattatccctttccttcctgcctctctttgctttcctggctctttcagaagatgttgaacaagttgtggacataagtggcaaccccattttcccaggtggcacatattacattatgccatcaacttggggcgctgccggtggtggattgacactaggccggacaggaaactcaaactgcccagttactgttttgcaagattactcagaaatcttccgtggcacaccagtcaaattcagcatacctggg

SEQ ID NO: 15073 - DNA, 273 bp, Glycine max
  Clone ID: 701069618H1
acttaatatcaccatgtctttcgactcctcaaaccacccaattagtcctgacttgtattgcactgaagtaactagcgaagtgattcacttggattccgatgatgaggctctgaagttcaatgttctatggggagactctgatcatgatgatagtgatgatgaaagcattctattgaacttgttagaatccgaacacaaccaagtgcaagcacaaacaaagttcctaggacaacaacttcgcaaaacaacatggctgattaatgctcgagaaga

SEQ ID NO: 15074 - DNA, 269 bp, Glycine max
  Clone ID: 701069619H1
ctcactcacaaacgcacactgaattcaaaaacatcgaaagagagaggcatggccgagcaaaccttcatcatgatcaagccagatggcgttcaaagaggccttattggcgagattattagcagatttgagaggaagggtttttacttgaaagggttgaaactcgttactgtggaccgtccttttgctgagaagcactatgctgatttgtctgcaaagcctttctttagtggtttggtggattacattgtctctggccctgttgttgccat

SEQ ID NO: 15075 - DNA, 268 bp, Glycine max
  Clone ID: 701069620H1
cccgcttcgtggaaatcccgaaccagaaaccatgcttctccgaaccgctgctgcttctgcttcgtccctctccctcttcagcccgcacgccgaacctccccgttcggttcccgctcgtggactggtggttcgcgcagcgaaaggatccacgaaccaccgcgccccgaccggagtgatttttgaaccgttcgaagaggtgaagaaggagctcgatctcgttcccaccgttccgcaagcttctctcgcgcgccaaaaatacgttgacgaa

SEQ ID NO: 15076 - DNA, 267 bp, Glycine max
  Clone ID: 701069621H1
ggtgaagtgttcggattgcggcgacgtgagcggttcgctgcccgcgacgtcgtgagaagtccactgaaccttatcatttagaggaaggtgatgaggatgaagctgatgatgagggaaaggaggatgaatctggtgatgatgatgacgatcaagaggaggatgacgatgagggtgaggaggaggatgacaagtgaaaaatacattatggtcatattactttttttttttggggttgtaggagtatttaagcgttctttaggggatgat

SEQ ID NO: 15077 - DNA, 267 bp, Glycine max
  Clone ID: 701069622H1
tagcaagctagctaggttgaaaatagtttggttttgtagtaagtgaggtgaggtgccaaaatggtgaagataactcttggtactttcgatgactcttttggtgttgcctctcttaaggcttatttggcagagttccatgcaactctgattttcgtgttcgctggtgttggttcagccatcgcttacaacgagcttacaaaagatgcacccttggatccaacggggctggtggcagtagctgtggcccatgcatttgcactgtttgta

SEQ ID NO: 15078 - DNA, 268 bp, Glycine max
  Clone ID: 701069623H1
gcctcctcttctcaagtctctttaatttctcaaaggaaaaagaagaagaaacaaaattttattttgagaaaaaaatggaggcattgaagatgaatcttttcttttttgtcatggccatgctgatcatggcagcatcagctgcagattcaccagctccaagtcccacatcggatgctaacaccttattcgtgccaacagcggttgcttcactcgttgctcttgcttttgggattctcttctgagtttctcaacaatgaagcaaacaact

SEQ ID NO: 15079 - DNA, 271 bp, Glycine max
  Clone ID: 701069624H1
gagtagcggcattaaaaatgcagatcttcgtgaaaactctgacagggaagactataaccctcgaggtcgagagcagcgacaccatcgacaatgtcaaggccaagattcaagacaaggaaggcattcctccggatcagcagcgtttgattttcgccggaaagcagcttgaagatggaaggaccctggccgattacaacatccagaaggaatcaacccttcatctcgtcctcaggcttcgtggtggcatcattgagccttccctcatggcttt

SEQ ID NO: 15080 - DNA, 266 bp, Glycine max
  Clone ID: 701069625H1
ggaatccaaaaatgagagacatcatcagcattcacataggtcaggccgggatccaggttggcaactcctgctgggaactctactgcctggaacatggcatccagcccgatggcatgatgccaagtgactcctccttcggtgtagcccacgacgccttcaacaccttcttcagcgaaaccggatccggcaagcacgtccctcgcgccgtcttcgtcgatctcgagcccaccgtcatcgacgaatccgttgtggcacttaccgtcaac

SEQ ID NO: 15081 - DNA, 219 bp, Glycine max
  Clone ID: 701069626H1
agaggcccagctcacgtgtgatgtacggctgtgattgtgtaatttgcaaaatcaaaaataacccccgagtcatatatgcatctgggtatggtatgttaaaagaacaaaagagaaaaacaaaaaaggaaagagaacagaagaaggagcgagaaaaagggaaagaaaaaaaggcacgacagaagcgacacaggggaagcagacgacaccgggggcgggggg

SEQ ID NO: 15082 - DNA, 265 bp, Glycine max
  Clone ID: 701069627H1
gatctgttcggagagagaaagatgttattatagttgttgagcggaggaacaagatgcgagtggttcaaattacactgagctcagtcagttgtatgagaaatacaaacagaaaggtctggaaattctggcatttccatgcaatcagtttggggcacaggagcctggatctaatgaacagatacaagagtttgtttgtactcgcttcaaggctgagtttcccgtttttgacaaggttgatgtgaatggtgacaaagctgctccactg

SEQ ID NO: 15083 - DNA, 269 bp, Glycine max
  Clone ID: 701069628H1
ctcctcacaaatacacacagaaagttgagaggtggtagtacctgctgcggaagcgttcagcagccaatagctttcgcagcagcatcaacaacaaaccaacgattcaaattcaacctcctcattcagatggcacaatctttctcaccagccaaacgcgcccttgccttttcccttcaccggcgagggtacgcagtggcgtctgatgcttctccttcggtgagagggggattggatagcattggaagcaggagtgcaatcgagaagggtgt

SEQ ID NO: 15084 - DNA, 268 bp, Glycine max
  Clone ID: 701069629H1
gctactttcatggctgtgactacctcttccagttccaccagcggcttcttccatctccggtcaccaaattcggtcgattccagcagggtctcctccacccacggctcttcctccgcttgcggaaagttcgatggggtggccatgtggttcatcaacggcgtcacaaccgctttcttcgcctccttgaaccgttgctcttgcattcgcatcgccaccgaagaagacggcgacgatgccaacgacttgccgttgatgctcaacgacggaa

SEQ ID NO: 15085 - DNA, 269 bp, Glycine max
  Clone ID: 701069630H1
atgtattgctctgtagttgatgataaaaaataaactcacgcactaatcactactacacaaatcacacacacacacacagagttgcaagagaaagagagcgagattccgatggcgactctggattccgacgtgcccatggttcccgccggcgagccctcgagcagcgccggtccttcttccaagaagcccaagcgcttcgagatcaagaagtggaaccccgtcgctctctgggcttgggacatcgttgtcgataactgtgctatctgccg

SEQ ID NO: 15086 - DNA, 253 bp, Glycine max
  Clone ID: 701069631H1
ctaattttactgtgtctaacttcttggatggagatagttggctgcctcaaactggagttccatacgtgactggattgatatagtcaaaagttacaagctagctggttacgtataataagagcaaagttgcttaacaattcttttaatgctgctgcatgtgtttctctattgtatttataaatgattaaatgcaccgctactctattgtaagattgtgattcactcattaataatatttacaccacttatattc

SEQ ID NO: 15087 - DNA, 203 bp, Glycine max
  Clone ID: 701069632H1
caaatcaacactcactgacatttgcaaggaagagggggagagaaagtgagggggggaaaggttatgctggtggtggtggtggcggtggcggcatgttttgtggattctaaaatctccaacactcactccctcttgctctctctatacaaatccaaacgtcgtgatcatgaattcgatccgcaaatttggctaatcaagtgcct

SEQ ID NO: 15088 - DNA, 274 bp, Glycine max
  Clone ID: 701069633H1
gaaagtgagaggagagagaaagtagcagatcctccatggcctccaccaaggaacgtgaaaacttcgtctacgtcgccaagctcgccgaacaagccgaacgctatgaagaaatggtggaagcaatgaagaatgtcgcgaactaaacgtggaattgacggtagaggaccggaaccttctgtcggttgggtacaagaacgtggtgggtgctcgtagggcttcgtggaggattctttcctcgattgaacagaaagaagaagctaaagggaacgatgtg

SEQ ID NO: 15089 - DNA, 267 bp, Glycine max
  Clone ID: 701069635H1
attcaccacttcagccacactcaacaacacccagtttggctcacacactaacacaactgttctgtccctttcttcctctcctcaacttgtttcctacttaacgcgtttccgtgaaccaatcgccgatctcgcgctttatctataaagcgcgagatacctcaccgcaaccagtggaactcaccgaattgaactcaagtttttcctcttctctcggtttcatcgccatggatgaagaagtgcgcaagatcttcagcaagttcgacaaga

SEQ ID NO: 15090 - DNA, 264 bp, Glycine max
  Clone ID: 701069636H1
cggaaactgatggtggattgtactggggaaggtgttttgttcattgaggctgatgcagatgtcacttaagcaatttggtgatcctcttcaacctcctttcccgtgctgggaggaactcctttatgatgtacctggttctcaaggagtgcttaacactccccttctgcttattcaggtaacgcggctcaagtgcgggggtttcatattagctgtccggctgaaccacacgatgagcgacgcagccggtctggttcagttcatgag

SEQ ID NO: 15091 - DNA, 268 bp, Glycine max
  Clone ID: 701069637H1
aatgaaagtacaattcagcaagcctccctttcaacaaccatggggtgttggtacatggttaaaggaaattaaagacactactaaagaaggatatagttttgaagagctatgcatcaagaaagaagccattgagggagaagagaagttttgtgcaaaatcctagggaacagtaattggttttgccatttcaaagctgggaaagaacattcaagtactttcaagttcctttgtcaataagcaagaccaatacactgtggaaggagtgcag

SEQ ID NO: 15092 - DNA, 264 bp, Glycine max
  unsure at all n locations
  Clone ID: 701069638H1
catgactcttcctccatccttatcggacccgccctcactctccgactcattctcgccgttaaacccagccctagccatggatagtcttcaagccacttacaaagacgaagaagatgaagaagacgagccgcagcctcaaccaccaccaaccaccgccgattcacctgaagcccctcccgccaccaccagcacatcctccgacaccctaancgaacccccgaacgacgcccgatcggagcccgagccctccgaagatctctccga

SEQ ID NO: 15093 - DNA, 255 bp, Glycine max
  Clone ID: 701069639H1
ccatctctctctctctcttccatgcttctttcccattacataactctttctctctctctgtgatcttatctccttttaattattcactcacccctttacactggttgatgcaaaaaaacatggtaccctctattgttggttgttgctgacactcttcatagtcgcaaagtaggtgactagcagtagcatgtgagtgaaggagcctgcagtttttttttatcgtactgtactatgtttgttatgtaatggtatcat

SEQ ID NO: 15094 - DNA, 266 bp, Glycine max
  Clone ID: 701069640H1
gcaagaatggcacttcgttgcttggtgatgtccctttctgttctcttcactcttggtcttgcgagagaaagccatgccagagacgaagatttttggcatgctgtttggccaaacactcccattccaagttcattgcgagatcttctaaagcctggccctgcaagtgttgaaatcgatgatcaccctatgcacattgaagaaacacagtacccgaaaaccttcttctataacgaagaccttcatccaggcaaaacaatgaaagtaca

SEQ ID NO: 15095 - DNA, 267 bp, Glycine max
  Clone ID: 701069641H1
cttaattcttacaatttattatctttctctaagaactcttccaattctttctctctcttcctctttagcttcatcgccatggcatcaccagcaagaaccttctttgccttcattctcgccgtcgtcgctctcttcttcgccgccgccaatgctcaagacctctccccggctccgagtcccgatgccggagcggcgggatccgtttcgagctccgtcgccatgatcggagcttcggttgtgctgtcattgatggctatcttgaagcat

SEQ ID NO: 15096 - DNA, 213 bp, Glycine max
  Clone ID: 701069642H1
cttaattgttaattctggtaaattatagtgtatgaacttttaaaaacaaaaaaaaaaaaaaaaaaaaaaaaaaaaaaaaaaaagaaaaatagaaaaaacaatagaaaagacatagtcccaggggggacgaacactgggctatggtgccgtactccggatgtgaaatgcgcaagttggcggcgtgctgtcgtacgccacaacatctgtcgcttc

SEQ ID NO: 15097 - DNA, 263 bp, Glycine max
  Clone ID: 701069643H1
tgaacacaagtagcagagtttacaatagctcatgcacgtgccactctctcttgggaagaagcattgaagaatgcaagcactattgggtatttcaactcagctcaagccttggcagattatgcatcaatactcaaacatgtaaagaagacattacacgccaaaaattccccagtgattgtacttggaggatcatacggtggaatgcttgcttcatggtttaggctcaaatatccccacctggcgattggtgccctggcctcatc

SEQ ID NO: 15098 - DNA, 265 bp, Glycine max
  unsure at all n locations
  Clone ID: 701069644H1
caattttcgagggttttattgattttccgatggcttctgcagatgttgagtattgttgctttgtcggtgggctcgcttggggcactgacgaccatgccctcgagagagtcttctctcagtacggcgaaatcgttgaaatgagaattatcaangatcgtgagactggcagatccaggggttttggatttgtgaccttcgcctcggagcagtccatgaaagatgcgatcggagcgatgaatggacagaacttggacggccgtaatat

SEQ ID NO: 15099 - DNA, 264 bp, Glycine max
  Clone ID: 701069645H1
caggcacttacaatgcttccaaagctgctcttcatgctttcactgatacattaaggtattaaaagtaattagcaacataacccatcttgttctaatgttcttaacttcttatacaagttgctttgttatgttatgtacaagctcagagatataaggttggcccactagcagagaaagggtgaatccttccaatcccgattaacatttcaaacaaaactaacaaattaacatttgtcatgtcatgtacaagctttttaggcttca

SEQ ID NO: 15100 - DNA, 270 bp, Glycine max
  Clone ID: 701069647H1
agataactagaaacagtgtgatgaaaatgaaggtccttgttctcttcgttgctacaattttcgtagcatggcaatgccatgcgtacgatatgttccctctccgaatgaacactggctatggtgcccgtactccggaggtgaaatgcgcaagttggaggcttgctgtggaagcacacacacatctttggctttgagaccattcctgacgagtgcgttgaagcaacaaaggaatacatccatggcgaacaatatagatcagactccaaaaca

SEQ ID NO: 15101 - DNA, 236 bp, Glycine max
  Clone ID: 701069648H1
gttctttacttgttgggttgttctgatcttctctcatagcaatcaaatcacactcccatcttctcatctcgtaaaccctaaaccccgttttcagtgacatcgagatcgatcgaacatggatgaggagtacgatgtgatcgtgttgggcacgggtctcaaggagtgcattctcagcggtcttctctccgtcgatggtctcaatgttctgcacatggacaggaatgatattacggagg

SEQ ID NO: 15102 - DNA, 274 bp, Glycine max
  Clone ID: 701069649H1
cacccaggcaggtgtcgcagtacgcggagaaaggacgctatataaatatatttgtccccgatgctctctatttcagccactcgtatattcttcctccgctcaacaactataagattatcttcttcttcttcttctcttcaattcttctccaatcccaaccgcaccctcttccgtccctttcttcacacttccttcaaaccacttccttcgtctttctctttccgaacagatcacactatggccacctcaaacgccaaatcagtccatgatttca

SEQ ID NO: 15103 - DNA, 266 bp, Glycine max
  Clone ID: 701069651H1
gtgaaaaccctaaccgggaagacaatcacccttgaggtggagtcaagcgacaccattgacaatgtcaaagccaagattcaggacaaagaagggattcctccggatcagcagaggttgatcttcgccgggaaacagctggaggatggccgtaccctcgccgattacaacatccaaaaagagtcaacattgcatcttgttttgaggcttcgtggtggtattattgagccatctttgatggcactggcgaggaaatataaccaggataa

SEQ ID NO: 15104 - DNA, 266 bp, Glycine max
  Clone ID: 701069652H1
ccaagattgtcgatgatcagtccatacttgaagatgaaccaaggttaagagaagtactaaagtttgcaaatgcatgtggagctattacaactacccaaaagggagcaattccggcccttcccaaagaggaggctgcactgaaactgatcaaaggggggtcacagaatcttttggcaaaatgcaaaagtgctagcatgatttcgttttcttcccctaatgtttaaattttccgttggatttgcttgctataagtttaggagggaact

SEQ ID NO: 15105 - DNA, 167 bp, Glycine max
  Clone ID: 701069654H1
cattggtctttcctgtgtatcagaggaaagccatgtgggatctcaattaggaatagcttagtgtatgtactgctgttgtatgcattctgtgaaatgtattcattgcggaaaagagatctaacctgacttttggtaagtccatgtttggagaagtaaatgcctctagt

SEQ ID NO: 15106 - DNA, 263 bp, Glycine max
  Clone ID: 701069655H1
ctcgagccgctcgagccgattcggctcgaggcaaaccacatccagatggagataatttgggtactgagagtacagtggtgttgcctgcaactgaaggtgacgatagtacaatttggctattggccaaggctcatgttattgtgaatgactctggttatcatcagctcgtgagccattggttaaatactcatgcagtgatggaaccatttgccatagcaaccaataggcatctcagtgtgctccaccctatttacaaacttctt

SEQ ID NO: 15107 - DNA, 269 bp, Glycine max
  Clone ID: 701069656H1
tttccctcctcccactcccaccgccaacgccaaacaaaccctaaatctctctcgtcttcttcttcttcttcctccttcaaccatgagcgagatcctgcacgttcagggaggccaatgcggtaaccaaatcggttccaagttctgggaggtgatatgcgacgagcacggcatcgatcctaccggaaagtacaacgacgaaggcgccagcggcatccaactcgagaggatcaatgtctattacaatgaggcctctggcggaaggtacgttc

SEQ ID NO: 15108 - DNA, 267 bp, Glycine max
  Clone ID: 701069657H1
cgcttccttggccgaacaacaatcaccaatggcagtggcgaatctgcagagactgtcctcgcaagtgcaccgcctcccctccgtctcgttcttctccaaatccctgatctcccgcacctccacctcttcctcctccacgaagaaggtcgcggaccgcatcgtgcggctgtcggcgatcgacttcgcgggtacgaagcacgaggtggtgggcctggccggtcagaccctgctgaaggcgctgataaacacgggcctggtcgacccgga

SEQ ID NO: 15109 - DNA, 266 bp, Glycine max
  Clone ID: 701069658H1
gagaatggctcccaagggtttaacctttctggctgtgttaatatgcgtttcagcactgtcactgagtccttctgttgcgggggaagggcaaaataatggccttgttatgaacttctacaaggaatcatgccctcaggctgaagacatcatcacagaacaagtcaagcttctctacaagcgccacaagaacactgctttctcctggctcaggaacatcttccatgactgtgctgttcagagttgtgatgcttcactgttgctggact

SEQ ID NO: 15110 - DNA, 265 bp, Glycine max
  Clone ID: 701069659H1
cggagtgtctgtgcaaatttgcgttgttcttcgcggcacacctcactcactgaacggtaagtatggcggacaaggctgttacaatccgaacccgaaagttcatgaccaacaggcttctttccaggaagcagtttgtcgttgatgtccttcatccagggagggcaaatgtttccaaggctgaacttaaggagaagctggctaggatgtatgaagtgaaagaccctaatactgtatttgtcttcacattccgaacacattttggagg

SEQ ID NO: 15111 - DNA, 266 bp, Glycine max
  Clone ID: 701069662H1
gtgttgtgttgcaaacagaaaggaaaaaagaagaaaataagagacagaagaaaaatatgagttacttgaatcgtgtttggatggcggcaacggtggcggtagcgcaaggccacaccgatcccggccacaagtgcaagacggcgctcaactccatccaccacaaccggagccgcctcttctccggcggagccctgtctgatctccggccgctgtccggcgtcgttggacctgacgtctctggcgcggcagcgggagctcgacgcgaa

SEQ ID NO: 15112 - DNA, 257 bp, Glycine max
  Clone ID: 701069663H1
ttctttcctcaaccttctttcttcttatatatcgaacatggctaagtatcattcaagtgggaaaagctcttccatgactgctatagccttcctgtttatccttctaatcacttatacaggcacaacagatgcacaatccggggtatgttatggaagacttggcaacaacttaccaacccctcaagaagttgtggccctctacaatcaagccaacattcgcaggatgcgaatctaaggtccaagcccagaagtcctcg

SEQ ID NO: 15113 - DNA, 188 bp, Glycine max
  Clone ID: 701069664H1
tggttcgatgggcaacacctcaactccataatatcgatgctttggctaaaatggttgatcctgcattggaaggactataccctgtgaagtccctttctcgatttgcggatgttattgctctatgcgttcagccagagccggaattccgaccacctatgtcagaagtagttcaagcgctggttcgatta

SEQ ID NO: 15114 - DNA, 281 bp, Glycine max
  Clone ID: 701069665H1
aactcggctcgagatgacatgaagagcggtcaagaaatctcaaaaacaccatcctcttctaagagaacactaagccagggttcagttgatatatatgctgctcagtgcaaaaattgtttgaaatggagagagattgatacacaggaagagtttgaagagattagaagtaaagtgactgaggaaccttttctttgcagcagaaaggctaatagttcctgtgatgaacctggtgatattgaatatgattccactcggacgtgggtcattgacaagcctaacct

SEQ ID NO: 15115 - DNA, 267 bp, Glycine max
  Clone ID: 701069666H1
cagaaagctaaaggctaaagcctagaaccttcttcctttacacctcgctggaacccgcgatggatcctcagcctgagccagtcagctacatatgcggagattgtggaatggagaatacgctgaagcccggtgacgttatacagtgccgtgagtgcggttaccgtattctttacaagaagcgcactcgtcgcattgtccagtacgaggcacgctgaagaaaactgctataacgtttgcaagtactttccatgaagaaattgttactac

SEQ ID NO: 15116 - DNA, 71 bp, Glycine max
  Clone ID: 701069667H1
cgagaacacaataaaatacaaaaaaatccggcgatacgcccatctctgggaaaagcgaaacccagaagtag

SEQ ID NO: 15117 - DNA, 261 bp, Glycine max
  Clone ID: 701069669H1
agcgagcgcgcagtttcaaagagaggatttgggattgggaaggcgagggattgcgctgcgtctcttcctcttctctttcgattcatccctcattcatgatcttccaatccaacaacctcaccctcacactcacacatacacacatctggccgcggagcgtccctcccatggcttcaaagcgcatcctcaaggagctcaaggacttgcagaaagacccaccaacttcttgcagcgctggtccagtagctgaggacatgttcc

SEQ ID NO: 15118 - DNA, 149 bp, Glycine max
  Clone ID: 701069670H1
ctcgagccgcaagttcaaagatgaagatgatccacgttcttttcctctttgctcttgtctcgttcacttcccatgcttctgtcaatgatttctgtgtagcagacctaaacaggtccagatcagccctttcagggctgcatcagtgcaag

SEQ ID NO: 15119 - DNA, 263 bp, Glycine max
  Clone ID: 701069671H1
ggcggcttccaccgcagctatgtcagacatgcttggaaaccccgtgagcctgagacgcgccaccaggtctgctccatcaccgtctacacctgttactttcaagaccgctgcgcttttctccaagaagaaggcagcaccacctcctccaaagaaaaagcctgctgctgtatcccccgccaatgaggaactcgccaagtggtatggtcctgacagaaggatcttcttgcctgagggtctcttggaccgatcagagatccccgagt

SEQ ID NO: 15120 - DNA, 261 bp, Glycine max
  Clone ID: 701069672H1
gattcattcttcaccaaaacttcgcaaagaaacactacacatccatggcaactgctggcgtgcaagaagttcgtgttccccctctaacttccacctctgagccaccttctctctttgacggaaccaccaggttgtacatcagttatatttgtccctcatgcgcacgtgtttggatcactcggaactataagggactacaagacaagatcaaactggttcctattgacctacaaaacaggcctgcttggtataaggagaaag

SEQ ID NO: 15121 - DNA, 265 bp, Glycine max
  Clone ID: 701069673H1
gcagaactctgcttcttcggattccgatcgcacgcgccgtcaccatggtgaacgttccgaaaacaaagaagccatactgcaagagtaaggagtgcaggaagcacacgctgcacaaggttacccaatacaagaagggtaaggatagcattgctgcccaaggaaaacgccgttatgatcgcaaacaatccggttatggtggacaaactaagcccgtcttccacaagaaggctaaaaccaccaagaagattgttctgaggttgcaatg

SEQ ID NO: 15122 - DNA, 261 bp, Glycine max
  Clone ID: 701069674H1
gtgagtttgttgatcgagataactagaaacagtgtgatgaaaatgaaggtccttgttctcttcgttgctacaattttcgtagcatggcaatgccatgcgtacgatatgttccctctccgaatgaacactggctatggtgcccgtactccggaggtgaaatgcgcaagttggaggcttgctgtggaagcacacaacatctttggctttgacaccattcctgaagagtgcgttgaagcaacaaaggaatacatccatggcgaa

SEQ ID NO: 15123 - DNA, 257 bp, Glycine max
  Clone ID: 701069675H1
tacagttatgtcggtggattcaaataaacccgctactagattatcgaggggtggaaaacccgatgccgagcattacaaagattctaagtctgctgccgaagcagcagctgaggcagctaagcaagcaattgctgctgctgaagttgctgcttatatggctatgaaggactataataatgaagctcctcaaccatatgcttacaatgataagttgtataactcaggagtcaactctgggaccttccaatcaaacaatc

SEQ ID NO: 15124 - DNA, 259 bp, Glycine max
  Clone ID: 701069677H1
ggctctctctctttctctcataaaaacactccgagtacaaagactctctctcctctcctctttgcattcgagtgaaagaagcgaagaaaaagaaacatgtcagacgcgttctgcagcgactgcaagaggcagacggaggtggtgttcgaccacttcgccggtgacacggtgtgctcggagtgcggcctcgtcctcgaatcccactccatcgacgagacctccgagtggcgcaccttcgccaacgagtccggcgacaacg

SEQ ID NO: 15125 - DNA, 264 bp, Glycine max
  unsure at all n locations
  Clone ID: 701069678H1
ggtgaccggcaacaccaaaaccaccaccgcctctcctacctcccggagccatggccgccaccgactcctccgctgcttcgtcacgccagctttcgcagagggagacggacatccagatgatgctcgccgacgacgttcanctcggnacnaaaacctgttacntctagatggaccgctacgtcntctagcgccgcaccgatggtatttacataatggatcttggaaagacatgggagaggcttcagcttgctgctaggattatag

SEQ ID NO: 15126 - DNA, 163 bp, Glycine max
  Clone ID: 701069679H1
tcatttggtctggcctgtgctactcactcagttactctttgacgttgtgtgccgtacaaagtgatgacgggtcaggctatgaacttcagccattccaaaacggtggttttgctctggctcatctccgctttctgcttcttcaccttgttccaaattgccctct

SEQ ID NO: 15127 - DNA, 249 bp, Glycine max
  Clone ID: 701069680H1
cgcttccacctcgcaaccatgatcatcccggagaagaaccgcaaggagatctgcaaatacctcttccaagagggagtttgcttcgcgaagaaggacttcaatttggccaagcaccctgagatcgacgtgccgaatctgcaggtgattaagctgatgcagagtttcaagtctcgcgagtacgtgagagaaacttttgcttggatgcactattactggttcctcaccaacgatggcatcgagtttctcaga

SEQ ID NO: 15128 - DNA, 264 bp, Glycine max
  Clone ID: 701069681H1
cagcagcagagcttgtatacgtcgccgcttcagcgtagaacatgatcattcccgagaagaaccgtaaagagatctgcaaatacctcttccaagagggagtttgctttgcgaagaaggacttcaatctggcgaacacccggagattgatgtgccgaatctgcaggtgataaagctgatgcagagcttcaaatccagagagtacgtgagggaaacatttgcgtggatgcactattactggttcctcaccaacgatggaattgagtt

SEQ ID NO: 15129 - DNA, 267 bp, Glycine max
  Clone ID: 701069682H1
cgaagacgagacattagcagcgttaaaaaaagagagaagaaaaatgcgaaagttccatccatggcccgttttcttcaagcgcgagtggaaacgcaactggcccttcctcgttggattcgcagtcaccggagctctaatcaccaaactttcccttggccttaccgaggaagaggctaagaattccaaatccgttaaggcgcacaaaaggtgacttctgaatcgtgacatctgcctggctttgcattttatgttaggttcgtcaagatt

SEQ ID NO: 15130 - DNA, 263 bp, Glycine max
  Clone ID: 701069683H1
gcacactctctgctcctagggtttctccttcgagtgagggaaatggctcccaaaccgcctagtacgggtctgtttgttggactgaacaagggtcacgtcgtcaccaagaaggaattgcccccacgcccctcagatcgtaaggggaaaacaagcaagagggtgcactttgtgaggaacctcataagagaggttgctggttttgcaccctatgaaaagcgtataactgagttgctgaaggttgggaaggataagagggcactgaa

SEQ ID NO: 15131 - DNA, 261 bp, Glycine max
  Clone ID: 701069685H1
aacagctgaaaattactgctttgagacgggagattgatgatcttatggacttgattgatgagatatgatacgtgactatgctgctcgagatgatgataatatggctctcattttgaccttgttttatagttgcaaagagattagcgatacttctgacggttggaattttggtgcagtctattattgtctagactaaggatctcatcttaactatcgctaattttatatccatgcttatctaaaaaaaaaaaaaaagggggg

SEQ ID NO: 15132 - DNA, 76 bp, Glycine max
  Clone ID: 701069686H1
ccctaatcatcataactggaagaacctcttcacgaaggcgaacctgatcagtgtcgaccgctccccccccccgcgc

SEQ ID NO: 15133 - DNA, 128 bp, Glycine max
  Clone ID: 701069687H1
attcgcacgcattgcttcgcctcacaacagcagcaatacgcagcaatggctcccaaacgaggtggaaaggctccggctcttgcacgtaagaagaagcctgagaaggtcacgaatccgttgttcgagaa

SEQ ID NO: 15134 - DNA, 263 bp, Glycine max
  Clone ID: 701069688H1
ccgagattccccctaaacccgtttgccttgttgtttgcgaagaaatggcgactaagaggagcgtgggaacgttgaaggagggtgatttgaaagggaagagggtgttcgtgagggtcgatctgaacgtgcctttggatgacaaccttaacatcaccgatgacactagagtccgtgctgctgttcccaccatcaagtacttaactggtcatggagccaaagtgatcctttctagccacttgggacgtcctaaaggtgtaacacct

SEQ ID NO: 15135 - DNA, 259 bp, Glycine max
  Clone ID: 701069689H1
cttgaactcaaggagatggctctgggaagaggcagtgcagtggttctactactttgcttcttgctgcttcactctcagatggctcgtgctgccacctacacagttggagattctgggggttggacctttaacactgttgcctggcccaaaggaaagctctttcgggctggtgacacacttgctttcaattatagccctgggactcacaatgtggtggccgtgaacaaggctggatatgatagctgcaagactccaagag

SEQ ID NO: 15136 - DNA, 260 bp, Glycine max
  Clone ID: 701069690H1
gtccggcagtggaacaacatgcaatacgtttcaacagcagcatttctgctctcaatatactctgatttccttcaaaacacaaatcaaaagctaaattgccatggcggcacagtggaccatgaagaaattcttaattttgctaagtcacaggttgattacattttggggtccaacccaatgaacatgagctatttagttgggtatggccctaactaccctaaaagggtgcaccatagaggggcatccattgtgtcatacaa

SEQ ID NO: 15137 - DNA, 261 bp, Glycine max
  Clone ID: 701069691H1
aaattgtgaagccagatttctgctcaagggattttctataggatggttgttgttcatcgaatctcatactctggaactcgaatgtggttgtaaatttcagagacaagaattaagacaccattttggaaacgttctaaatgaagggtagagacagagtgaactccaactctcatatttcacagacattggagatgttggatgtgatgtctttgagttaccccttccaaacattgttgttagtatgtgtaactactcctagtc

SEQ ID NO: 15138 - DNA, 261 bp, Glycine max
  Clone ID: 701069692H1
tgagtttatgtctttgtttatatcaccaatttgctatttgtaattttaatttatttctgctagttgctggttttaattttagtttatctttttccctaactggccttgaaatctttaattgtaaattgctatttgcttgtttggttttctctgatgacttattttaaagaatctattagtatcaaataagagcatggcatctagtctcacaagaataagcacaaaagacgccgaacagaatttgagatttttgcttccagt

SEQ ID NO: 15139 - DNA, 240 bp, Glycine max
  Clone ID: 701069693H1
gcaataagtccctccttcctctgccttataattcttgtgacccttttcgctggtagcattgaaagtgcaccagcaaacgtgaagccaagccattatgctgcacccttcaataggagtgtttttcctctggttttctatttggaatagcttgcagctaccagatagaaggagcagcagtatagatggcaagaccaagtatatgggaactatactaacagaacaggagatttgggtctagtg

SEQ ID NO: 15140 - DNA, 264 bp, Glycine max
  Clone ID: 701069694H1
tagagttgttaccatttgctcccagtacagagcttaaccgagcttcacaaagatgaatcgggaaaagttgatgaagatggccggttcggttagaactgggggaaagggtaccatgagaagaaagaagaaggctgtccacaagacaacaaccacagatgacaaaaggcttcagagcaccctgaagagaataggggtgaatgccatcccggctattgaggaggtcaatatctttaaggatgacgtagttatccagtttctaaatcc

SEQ ID NO: 15141 - DNA, 242 bp, Glycine max
  Clone ID: 701069695H1
gagagttcttgaggaagaagaaaaggaggctaaataaagagagtgaagaagaagagagggtttgggttttggtgtttgttgttgaatcgtgaaaatgttcagaaaccagtacgacacggacgtgaccacatggagccctgcggggaggctgttccaggtggagtacgctatggaggcggtgaagcagggctcggcggcgatagggctccgatcgaagacccacgtggtcctcgcatgcgtca

SEQ ID NO: 15142 - DNA, 280 bp, Glycine max
  Clone ID: 701069696H1
gctttcagttcggctcgccccgcgatcaacctcgacgaaggcaaggcgctgcttctcggctccttcagatttctgaaatggcgcctgtttcagctttagccaagtacaagctcgtcttcctgggtgaccaatccgtgggcaaaaccagcatcatcactcgcttcatgtatgataaattcgataacacctatcaggctacaattggtattgatttgctatcaaaaactatgtatcttgaagatcgaactgttcgactgcagttgtgggatacagctgggca

SEQ ID NO: 15143 - DNA, 98 bp, Glycine max
  Clone ID: 701069701H1
caagtaacttaaggtttcaaacctaggaagttggaagtcatggcagcaacattgatggcagcaacaacaagttctggtactcttaaagcaactccttt

SEQ ID NO: 15144 - DNA, 274 bp, Glycine max
  Clone ID: 701069702H1
atgcaaagggtcatctgtggtgatgagtggtcatggaaccacaatcttgaagacagtggcagagtttgagaaatggaaagagtttgtggtgaaaaaggggtttgagccctctttcaaagagcaccatgaaaggattaggcgcacccacatcgctgcatacaccttgaaattcctaatgctgctgggaagttaccagagaccatacgatgcccagagtgtggtaggataatggagatgttcatcagttataaatgcaaccacagtgataatactt

SEQ ID NO: 15145 - DNA, 263 bp, Glycine max
  Clone ID: 701069705H1
ccgactgcgattcagcacaatgggtgcctacaagtatgtttcggagctatggcgcaagacgcagtctgatgttatgagattcttgcagcgggtgacgtcgtgggagtatcgccagcaaccttctattgtccgtttgacaaggtctactcgcccaataaggctcgtcgcttgggtttcaaggctaagcagggttacgctgatttaccgtgttcgcgtacgaaggggtggccgtaagagaccagttccaaagggtattgtttatg

SEQ ID NO: 15146 - DNA, 283 bp, Glycine max
  Clone ID: 701069706H1
tcgcattgacctgtaaccttttctctccggttaccaaaaccgtaagtcgctgaacatggacccgcaatcgccggttcgggcggaactgcgagctccggttccgacgttctccccacggttcgcgctcacatccagttcgcagcggaaaatcgcgacgcggtcgatctgagcgacgagagtgcctacgcggtacgctgggcggtgcagaactacctgcgaccgggcgacgccgtgatcctcctgcacgtgcgtcccacgagcgtcctctacggcgcggactggg

SEQ ID NO: 15147 - DNA, 76 bp, Glycine max
  Clone ID: 701069707H1
ggctcgagcgacatatggcaaaactattagccggacgaaggagacactttggccataaaccaaccactcgtccaaa

SEQ ID NO: 15148 - DNA, 231 bp, Glycine max
  unsure at all n locations
  Clone ID: 701069708H1
ttaggctgggaactgnatatccgcaattctctctctcccgataacgccacagtacagtttctctgtatttcacagtacaatcaaatgtcttgtcgatctaacatgggagataatgttggagaatcaagttagctaatgtcgagattatggcattgggaggactcatagatgaatggtcttaaagtgatccgaagctatgcgatgaggcatcttaaagaacaggacatttgg

SEQ ID NO: 15149 - DNA, 287 bp, Glycine max
  unsure at all n locations
  Clone ID: 701069709H1
ccactttcacttgtctccgaattagtcatcttgagaaacattattcgcattgctatatattatggctagcatgaaggctacatgggtggttgtgatcatgtgcatggccgtagtgngtgcaccgatgatggcgccagctatgacatgcaatgatgtgaccgtgacatggcacagctgctatcctacctgatgcanggaggatcaccttcaacactttgctgcagcggagtcatgaacatttctggctctgctgtcaccaccgttgacatacatactgtgtgcactgt

SEQ ID NO: 15150 - DNA, 282 bp, Glycine max
  Clone ID: 701069711H1
ctctctctctctccaccatgcaccaagccattccctaccgaacctccatcctgaccggaacatgtgacatggcacacgccggaggaatcaaagaattcaacctcgccaatccatccaacgttgccgcaatggtttcggagagcgcagtggtaacattgggaaacgggggtgctgcatgtgccacgtggtcaaaaggttgttgcaaggtctgggagtgaaccctcccgtgtacgacgtcgacgaggaccacgaagccgccgttgctcgccacctgttcccgca

SEQ ID NO: 15151 - DNA, 284 bp, Glycine max
  unsure at all n locations
  Clone ID: 701069712H1
cagaaacagtgtgatgaaaatgaaggtccttgttttcttcgttgctacaattttcgtagcatggcaatgccatgcgtacgatatgttccctctccgaatgaacactggctatggtcgccgtactccggaggtgaaatgcgcaagttggaggcttctgtggaaccacacaacatctttggctttgagaccatccctgaagagtgcgttgaagcaacaaaggaatacatccatggcgaacaatatagatcagactccanaacagttaaccaacaagcttactttta

SEQ ID NO: 15152 - DNA, 263 bp, Glycine max
  Clone ID: 701069713H1
tatcccatactatgcacaacatcggatatggaggtggaggaatttaatgaaaccgtatatgatgaatgggtttacaagggcgacgcaccggcaattgccagagactcttaaaaattacaaccaagctgttgtctcttggttcaagattgtaatcttgtcaggaagataatcttgacaaaatggccgtaacagaagcaaacctaaagaaggctggcttccacacatgggagcagtcaattctcaaggatcaaaatcttatcact

SEQ ID NO: 15153 - DNA, 162 bp, Glycine max
  Clone ID: 701069716H1
cttttgtgttagtcgagaaaagttctctctgcttctctttcttagactctaaaccctattgcctgctttgcaatcgatcccgagtatggtcaacagtaatctcccttgatgattcttcgagggattgacaggcagggaatattggattggctcatcttgagt

SEQ ID NO: 15154 - DNA, 264 bp, Glycine max
  unsure at all n locations
  Clone ID: 701069717H1
ctctcttctgtcattgcttctcctccacacacgcacagagacacacacttttgcagtcacattgagaatggggcgtgttccacgaagacggtgaaganatctcgcggcagtgatagagaggtatactccgcatgacgtggacttccacgaacagaaggcctggagaggtggcatcattcctccaaaggtccgcaacaagatgcggggtctccacccatctcatgaagcggatccagaagggtcccgtgcgtggaatctccctga

SEQ ID NO: 15155 - DNA, 98 bp, Glycine max
  Clone ID: 701069718H1
aaggcggcacgaggaacatgtccgcattgctcaggtctcggtcactgcccaggcatctgtcaatgatttctgtgtagcagacctaaaaaggtccagat

SEQ ID NO: 15156 - DNA, 266 bp, Glycine max
  unsure at all n locations
  Clone ID: 701069719H1
cgcagacgaacattccgctcacatcgcatctgtaacaatggaagagcgncatgnaactcttggtcgacgaacgttggacgaaattcggccaaagagggccgcggagagattgagtaaaacttcttcgggacaagatctcacgcaggttcccgaacctccgagattgcgggaatgagcaagtccgagagcggaaataagctctctgagacacatcttagtgctctattgtctcaattgaaaggactgcaaaagaagaacagggagtt

SEQ ID NO: 15157 - DNA, 243 bp, Glycine max
  Clone ID: 701069720H1
ccggaggccacagaggcgaaagcaggacctttaagcttcctaatcccctgtactacattcagtagttccttcacctctcaacaatctagcttgctcctatctatctatatgtaataagatgcgttcaaataggggcactagcttcactttatgtgtttcagctgtgtgtcaacaagtcatgtaagagacttcactatgttgttttctctttcgtggctttaataaattatgcgcccttgttcc

SEQ ID NO: 15158 - DNA, 278 bp, Glycine max
  unsure at all n locations
  Clone ID: 701069721H1
ccaaacacccacattttcttcttcttacattcccatttctctctctctctctctgggttattagcaaaaatggcgtcgagtataggcatgatggacagtgcctactttgtcggaaggaaccagattctgacctggatcaacaacaggctccactcaatctctcacgcattgaggaggctgcatctggggctgtgcaatgccagatgatggatatgacgtntccagggggttgtcccatgcacaaaggtgactttgatgccaagactgagtatgatatg

SEQ ID NO: 15159 - DNA, 145 bp, Glycine max
  Clone ID: 701069722H1
ctcgcttgtgctgccttcgtttgcctttttatcacgacaggaattaacatatgatatagctaagcactggcagtacacacttctaacgagccttaagctgctttcctgctgggggttggagcaaaagtttggatgaagtaacctt

SEQ ID NO: 15160 - DNA, 295 bp, Glycine max
  Clone ID: 701069723H1
cggaatcggctcgacggagtgtctgtgcaaatttgccttgttcttcgcggcacacctcactcactgaacggtaagtatggcggacaaggctgttacaatccgaacccgaaagttcatgaccaaaaggcttctttccaggaagcagtttgtcgttgatgtccttcatcagggagggcaaatgtttcaaaatcagacttaaggagaagctggctaggatgtatgaagtgaaagaccctaatactgtatttgtcttcaaattccgaacacattttggaggtggcaaatccactggatt

SEQ ID NO: 15161 - DNA, 264 bp, Glycine max
  Clone ID: 701069724H1
tctttcggttacttattcagtagttcttctctctcgaatttccactcactttctgtgcatcaatggcggcgataagtctccggaaggggaacacgcggcttccgccggaggtgaaccgcgtgctgtacgttcggaaccttcccttcaacatcaccagcgggagatgtacgacatctttggcaaatacggcgccattcgccagatccgcatcggcaccaacaaggacactcgcggaaccgctttcgtcgtctacgaggacatcta

SEQ ID NO: 15162 - DNA, 285 bp, Glycine max
  Clone ID: 701069725H1
ctctgtcaatgatttctgtgtagcagacctaaaaggtccagatagcccttcaggctatcagtgcaagccacctaacacagtcacagtggatgaccttgtgttctctggctttgtagctggaaacaccacaaacactttcaatgctgcattaacctccgctttgttactgattttccaggtgtgaatggtcttggtgtatctgcggcacggttagacatagccaaaggcggatcaatcccaatgcacacacaccctgctgccactgaacttctaataatggtggaa

SEQ ID NO: 15163 - DNA, 69 bp, Glycine max
  Clone ID: 701069726H1
gcacaacacaacacaaaaccctttcccaaaaaaatagaggataaaaaatggaggaatccaaattcggcc

SEQ ID NO: 15164 - DNA, 245 bp, Glycine max
  Clone ID: 701069728H1
atgagttgctgttaaggactcatctgctccccatggagttcgtctcttgattgaagactatccttatgcttctgatgggctagagatatgggatgtcatcaagtcctgggtgcaagaatatgtctcattctagtacaagtcagatgaggaactccacaagactctgaaactcacagcatggtggaaagaacttgtagaggtgggtcatggtgatttgacagataagccatggtggcaaaagatgc

SEQ ID NO: 15165 - DNA, 283 bp, Glycine max
  unsure at all n locations
  Clone ID: 701069729H1
ctttaaacggagttctaaatttccggcgagtttccctctctcgaatctgccacaccgacgaatctcactaagcggaacttcgcattcagaaaatggctngcccgcgcngnagntgncccgagcngaagtgcagnagatantgtcagcatgatggaaggagaacagacgatggtgcggcctctgaaggagcagatggaactatgctcgaattttacactgatgatgcacctggactcaagatctccccaaatgtggttcttgtaatgagcattggctttatagc

SEQ ID NO: 15166 - DNA, 271 bp, Glycine max
  Clone ID: 701069730H1
ccagacagcaagctcatcctagcgttgtaaaaacggtagcagactcctccatgggtctctcttccccatccttggctggcaaagccgtgaagctgggcccatcaggccccgaagtcgggaaggtcagcatgacgaagaccgtcaccaagcaggactcctcggaagcccatggtacggcccagaccgcgtaaagtacttgggcccattctctggcgaacctccgtacctagtcactggcgagttccaggtgactaggctgggacactgctgg

SEQ ID NO: 15167 - DNA, 246 bp, Glycine max
  Clone ID: 701069733H1
atttactcactcactgtgagagcggcgaagaagaagaagaacaataatgaaggacgccggaaagagccacaaggcgaatgcaaagctgtcgccggagacgcggaaggatccggaaatcggcgacggggctgaatggatcgccgaagaagggaggcacggcgggaagttcacgtggatcggcaacggttaagagaacgtcgagatggagcacggtgctatggacgccaaggaccgaacttcgaggat

SEQ ID NO: 15168 - DNA, 156 bp, Glycine max
  Clone ID: 701069734H1
gtcggaatcggctcagcttcgttagcgaaacaacaagtacgtacagtgttgttttgtttgtcttaatttgttccatggagatggagagccctttgtgcggtggcattgctataggacttgttttcagcaactgggtcgtaggatatgatcaatatc

SEQ ID NO: 15169 - DNA, 275 bp, Glycine max
  Clone ID: 701069735H1
ctcaaactgtggctgtcggagtcatcaagagtgttgagaagaaagaccccaccggagccaaggtcaccaaggccgctgccaagaagaagtgattgcatttgggcaattttgctagcacatgtgatcatcatcgtggttactcctttatgtagttttatccttgcagagtcttaggtgttttgtttaagttatatttttaagtttctgccgatttcatgtagccgtaactttcaaaactaggttcttgatcggcggtggtcaattttcattgctgt

SEQ ID NO: 15170 - DNA, 277 bp, Glycine max
  Clone ID: 701069737H1
ctcaaagatgaagatgatccacgttcttttcctctttgctcttgtctcgttcacttcccatgcttctgtcaatgatttctgtgtagcagacctacaaggtccagatagcccatcaggctatcagtgcaagcacactaacacagtcacagtgatgactttgtgttctctggctttgtagctggaaacaccactaacactttcaatgctgcattaacctccgcatttgttcatgattttccatgtgtgaatggtcttggtgtatctgtggcacggttag

SEQ ID NO: 15171 - DNA, 272 bp, Glycine max
  Clone ID: 701069738H1
tcagggttctcatttcgcaaccatcggccgcacttactcttgttctcaagggattcgattttctctgcactcacttctagggtttcctccgcgctatcagcaatcatggccgacgaaacaccaaatgagatgaaggaggaggttccagaaatgttccttttgatcctaccaagaagaagaagaagaagaagattacaattgtagatcctgctgatgaccctgtggagaaattggctgagaagacagacaactctcagttctgacggggtgag

SEQ ID NO: 15172 - DNA, 72 bp, Glycine max
  Clone ID: 701069739H1
ccagaaccaatcttcctccctttgagttttgtagttttggcttcacttggattatattattggctactatta

SEQ ID NO: 15173 - DNA, 101 bp, Glycine max
  unsure at all n locations
  Clone ID: 701069741H1
aagctcaataagcagttgngctacctcgttcggaacatcgttgagatattggaaatgaacccagaagacgaagctgaagcagatggtgccaatattgatct

SEQ ID NO: 15174 - DNA, 289 bp, Glycine max
  unsure at all n locations
  Clone ID: 701069742H1
cgaagcagcaagaggaagacggagaaggagaagatagaggatgaagtggaagacatgttgcgagcggcgcaagaccaaatcctcttaaatctcacccaagcccacatagcagcccgtccttctccggatcatgatcatgatctggatctggatctggtctggagcgtcgattccaggccctcaaaatgaaaaccaaatctcaacctcaagatgatctctctgccagattcgatgccctaaaagccanatcatcatcttctgttgtcacagcatccaattccaacgccca

SEQ ID NO: 15175 - DNA, 276 bp, Glycine max
  unsure at all n locations
  Clone ID: 701069744H1
ctaagtagggtggaagattcagaagcgcgacgaggatttgattcacgaaatttgcaacgaagttggcgttgatagaagcgttctcaaggtttggatgcataacaacaaaaacacctttgccaaaaaggataacaataatattgttactagtatgatattaatattactactanaaatactatttctactgataatgatgcaaatcggagtgctgtcaaggtttttgaaaaccctaacaatgatggtggtgaagatcgcgctgaagatccgagtagt

SEQ ID NO: 15176 - DNA, 269 bp, Glycine max
  unsure at all n locations
  Clone ID: 701069745H1
cggcgtcgtcgctgtttttgtgtgtcgcttcttcgtaggtgcagctgcaatggtgaacggacgccaaggagaacgtgtcagactctacgtgaggggtacaatccttgccagcaaaaggtccaagtcaaaccagtatccanatacatccctgatccaaattagggtgtgaatgccaaagaagaagtagcatggtatgctggcaagaaaatggcctatatctacaaggctaaggtgaagaagaatggaagccattaccgctgcatatgggg

SEQ ID NO: 15177 - DNA, 291 bp, Glycine max
  Clone ID: 701069747H1
cctatttttcctaatcccatttctctctttctcgttctcttgaatttctagggttaccgttggaaccactcgccagtcacgtacgtacggaggctctctcttcctccgccatgaactcacggcaatcctctctgtcgccctgtgacatctgcggcgccaccaaaccctatctctgaccatccacaacatccgccaccgcgcccacacctgccgccactgcaccaactgcgtcctcaagcagcatcctggcctcttctgccctctctgcttcgaactctacgacgactcgcc

SEQ ID NO: 15178 - DNA, 284 bp, Glycine max
  unsure at all n locations
  Clone ID: 701069748H1
tgatcgagataactagaaacagtgtgatgaaaatgaaggtccttgttttcttcgttgctacaattttcgtagcatggcaatgccatgcgtacgatatgttccctctccgaatgaacactggctatggtgcccgtactccggaggtgaaatgcgcaagttggagcttgctgtggaagcacacaacatctttggctttgagaccattcctgaagagtgcgttgaagcaacaaaggaatacatccatggcgaacaatatagatcagactccanaacagttaaccaac

SEQ ID NO: 15179 - DNA, 237 bp, Glycine max
  Clone ID: 701069749H1
ccacaccttaaaaggagttgggaggatgaagtatctccgtccactttatactgctcttgtgagaggcagtcggaaggacaatggtaaagtatttgccacaagactattttcagaggctcgtgaatgtcaccatccaattgctcacgggttgttaaggcgatatttgccaagcatctcgagatggtataattctcagaatgtgttatgtatttgaagatctgcaagttctctgagtgt

SEQ ID NO: 15180 - DNA, 61 bp, Glycine max
  Clone ID: 701069753H1
ctcgagccgatcaacttgggaggttaaagagacggcaacgttgtgccgtccgccttgaccg

SEQ ID NO: 15181 - DNA, 81 bp, Glycine max
  Clone ID: 701069754H1
gggtcgagccgaatcggctcgagctgcagcgccttcgatctagaaaaggtgactaagagaacaaagctggctggcattgtt

SEQ ID NO: 15182 - DNA, 279 bp, Glycine max
  Clone ID: 701069755H1
cgctatttctctatggagacgaaacactgctaatgttatccgttatttccccacgcaggctttgaacgctgcatttaaggattacttcaagaggcttttcaactttaagaaggatagacatggcaactggaaatcgtttgctggcaacttgcctctggtggtgctgctggtgcaccatcccttttgtgtgtttactctcttgactatgcccgtaaccgtcttgccaatgatgcaaggctgcaaaaaagggtggagagagacaattcaatggtctcgttg

SEQ ID NO: 15183 - DNA, 282 bp, Glycine max
  Clone ID: 701069758H1
cttcttgtcaggaagatatcttgacaaaatggccgtaacagaagcaaacctaaagaaggctggcttccacacatgggagcagtcaattctcaaacgatcacatcttatcactccaaatgcactttcatacaaatcagcaatgagagagaatctgtgaggcagggatacagaattgttggaatcattggagaccaatggagcgatctgcttggagaccacagaggcgaaagcaggacctttaagcttcctaatcccatgtactacattgagtagtaccttcac

SEQ ID NO: 15184 - DNA, 85 bp, Glycine max
  Clone ID: 701069760H1
cttgcatcttctcaggtaagtcgtgaagatgtacacatcaaggaagaccatccacaaggataaggctgctgagccaactgagttt

SEQ ID NO: 15185 - DNA, 279 bp, Glycine max
  unsure at all n locations
  Clone ID: 701069761H1
cgnctctctcgaccgatctccggtcgaagtacaacgtgcggtccattccggttcgcaaggacgacgaggtgcaggtggtgaggggaacctccaacggncgcgagggncaagtggtccaggtctatcgccgcaagtcggtcatccacatcgagcgcatccccgcgagacggttaacggctccaccgtcaacgttggcattcacccttccaaggttgtcgtcaccaagcttcgaatggacaaggaccgcaaatccttgctcgatcggaaggccaagggtcg

SEQ ID NO: 15186 - DNA, 285 bp, Glycine max
  Clone ID: 701069762H1
attgaatctcaagattctaagagagattttgctgctctttgaagaagggtgtttgcttgattttcgagatgtcgctgctctcagatctcatcaaccttaacctctcagacactactgagaaggtgatcgcagagtacatatggatcggtggatcaggatggacctgaggagcaaagcaaggactctcccaggaccagttagcgacccttcaaagcttcccaagtggaactatgatggttccagcacaggccaagctcctggagaagacagtgcagtgattatata

SEQ ID NO: 15187 - DNA, 291 bp, Glycine max
  Clone ID: 701069763H1
ccgctctctacagccaggaacaaaatggggtcagagaggaatttgcatgacagcagataattatgaacctccaggcgagtgctcaatcatacgttgaactccaattctttctcttttctgaggagaactactttttggatgtttatagtcagtccttgaaagtgtcatatatatatgttatctgatccagccatgtgttcaataagcttttgtgacgatctatatataaagcccagctagtgcaaatgagcaaaatgatgatcggtcatagttaatctcattatttatttc

SEQ ID NO: 15188 - DNA, 90 bp, Glycine max
  Clone ID: 701069765H1
cgcctcgacccacaacgttaataatagacaccttgtgtggttggtcacttggcttgtcatgctcatgcttctgaacaaacttactattaa

SEQ ID NO: 15189 - DNA, 77 bp, Glycine max
  Clone ID: 701069766H1
ccagacaatgtttggctttttaaaaaaaaaaaaaaaaaaaaccaaaaataaaaaaaaaacgcacacaaaaacggggg

SEQ ID NO: 15190 - DNA, 234 bp, Glycine max
  unsure at all n locations
  Clone ID: 701069767H1
agtagtcggattcggtcgagtctggactcatatgtaaatcttattcctgattctttacagacgccactacatgttacatctgataacatacatatatagatttatacatatatgtaatgccaaggcatacataggcggactattcattattagactcattgtaatgtttgcattcttcatcacatgtcaaaggtatatgttattttgctcanaaaaaaaaaagattctagccga

SEQ ID NO: 15191 - DNA, 236 bp, Glycine max
  Clone ID: 701069768H1
cgcagtgaaagtatacggtctccactgtgcttccatcaagcgggtgctggtttgtctggttgagaaggatgtcgaatttgatgttgttcctgatgatgtctctaagggggagcagatgtgatctgagtacttcaaactatagtcatttggagttgtcctgtcatcaatgatggagattatatcttatatgaatctcgtgctataatgatgtattatgctgataaatatagatctca

SEQ ID NO: 15192 - DNA, 278 bp, Glycine max
  Clone ID: 701069769H1
tatagcttcctcttctttcatcacagtttgaaaaaagaaaaaccagaaaagaattccaaggtttctattttttgaggcaacaatgggtttgacggtgtcacggctatagcagattgtctaatgcagggaaagaaatgaggattctgatggtgggtcttatgctgtggggaaaacaacaataatctacaaactggaacttggagaaatcgtcactacaatacccacaataggcttcaatgtggagactgttgagtaccaaaatgtcagcttcaccgtct

SEQ ID NO: 15193 - DNA, 246 bp, Glycine max
  Clone ID: 701069770H1
ctgcttcttctcttcctcttctcaaccttcttaccctcgctctgtcactactcttctgcattgccttaacttccgaggttggcgtgcaggcgcagatggaggagacaggcttgaacctcatgtcggaggcgttggagtggccaaccgcaatgtcgctctacgacgaagacagcgaagaagaggatgtccagaacggttacagtcggagatcgttgttctggcggaggatgaagtactacatctcct

SEQ ID NO: 15194 - DNA, 279 bp, Glycine max
  Clone ID: 701069772H1
ccattaatcaaacatggctagggttagtgctttgtttcactctttgctcttgatttcttcccttgtattggcttctcaaatccatgtttcctctgggaaactagtccctggactatcatggaattactaattgttgacatgtctcaagcttagagggatatacagcagcatcttgaggatgtcttcgagaaggacagtggagtagctcctggcatacttcgactcttcttccatgactgctttcctaatggatgcgatgcgtctatcatgttgaatgga

SEQ ID NO: 15195 - DNA, 282 bp, Glycine max
  Clone ID: 701069773H1
atcttcatctcccaagggattcaatacaataccaggctagaagaaactccattcatcaccatctcaagcaactaattaacaaggtagtactctttgagtgtttggcaattggcttagatttcttgtacttggaacaagatggatagcactgtcaatttgagactgatctcaacctcaaggcaacggagcttagattggggcttccaggaacagaagaaattgttgaaaaaccacttcctgcaagtgctagaattaccaacaaaaggactttgtctgaaacct

SEQ ID NO: 15196 - DNA, 52 bp, Glycine max
  Clone ID: 701069776H1
ccgagataactatgaaacagtgttgatgaaacatggagtggccctggtttcc

SEQ ID NO: 15197 - DNA, 287 bp, Glycine max
  Clone ID: 701069778H1
ctaacactttccaatacaataatcacacactgaatatccgatcggagatgtctgccgccgccgaagaagctaacgctcccgccgtcgaaaagccggttgaggaggtgaaggcgccgaaccccgcgaaggagaagaaacctaaggctccgaagaaaaaagccaaaacaggccaaaacagcttcacatcctccatattttcagatgattaaggaggctttgatcgctttgaacgagaaaggaggatcgagtccttatgcgatacgaagtacatggaggagaagcacaag

SEQ ID NO: 15198 - DNA, 231 bp, Glycine max
  Clone ID: 701069779H1
cagagcagagagaccttgaagagctatggacgtcggaaagaataacgaggatttccaagggaaagaagggtggaaacacgaaagcagctgagccctttgctaagaagagatggtacgatagcaaggctccttgcctcctcgaggtcaagactatgggaacacactcgtctctcgtacaaagggaacaaacattacagccgaaggactcacagatagggtattaaaggtctc

SEQ ID NO: 15199 - DNA, 280 bp, Glycine max
  unsure at all n locations
  Clone ID: 701069781H1
ctttggttctggtttatagatctctgtgaagtcgctttataacacccaacctaagatgcagaacgaggaaggacagatcaccgagctttacattcctaggaagtgctctgcaacaaaccgattgattaccgctaaggaccatgcttcggttcggttaacattnggcatgtggatgagaatggcgtctacaatggccatgtctccacttttgctctctgcggcttcatacgtgctcagggtgatgctgacagtgccctagatcgcttgtggcagaagaaga

SEQ ID NO: 15200 - DNA, 127 bp, Glycine max
  Clone ID: 701069782H1
gtgtgaaatcgtgacacctatgcactgaagaacaagtaccgaaaccttctctataagacgacttcatcagcaaacatgaagtacatcagaagctcctgcatcgacatggggtggtaatggtaaggaa

SEQ ID NO: 15201 - DNA, 275 bp, Glycine max
  unsure at all n locations
  Clone ID: 701069784H1
caagttcctccacagttttaatctgctatggcagcgagactcgcgattgagaggagcaccagatggagattgagcagcgttttaggggtcaataggtggattcagtcggtgccccaatctcctcctttagctggaagcattgatcttggggttcggcgccgcaacccgttttgcccgagttttcccccccaagtttctcttatgggagctccatggagctcatggctgtcncanaacggcaggtttctccccataaaagaggaataaggaatgga

SEQ ID NO: 15202 - DNA, 175 bp, Glycine max
  Clone ID: 701069787H1
tcacaattcactactcaactcgtcactctctggtttcaccgcttcgcgccgtctgtgggtaacattcatcggcggcatcatcatgtttaacaatctgccgcggcatcagtttgggaacctgcaaagcaagatgtttccggcgtatttctcgatggtgggtgtctgctgcgccgta

SEQ ID NO: 15203 - DNA, 282 bp, Glycine max
  Clone ID: 701069789H1
cggctacaaatttatgtttgtaggtcaaggctctggagtatgttggactggctccaaagggtagtctaagggttcaagatttcctagagacggctgcagagggactagttgaaggaggacagtaagtttcgcatctatctcataatatcacttctagccatgcatatgaaatttatggatatagtttttcacctgagtacaaatgaggatgctctttgcaacatgtacagttctcctcatcaatgtggcaatttttaatcctcaaggtctctaatctgagtc

SEQ ID NO: 15204 - DNA, 251 bp, Glycine max
  Clone ID: 701069790H1
gtctttagctcgcgagcatggaccaaggccattactaacggacctgcaatctgaccggaaaaatgtgaaatggaaaaagccggaggaatcaaagatttaaactcgccatccatcaaaggtgcggaatggtttcgagagcgagtggtatcattgggaacgggggtgtgcatgtgccagtggtcaaaggttgtgcaagtctgggagtgaacctcccgtgtacgagtcgagaggaccacgaagcgccgtgctcg

SEQ ID NO: 15205 - DNA, 289 bp, Glycine max
  Clone ID: 701069791H1
ctttgttgtgagctataagctagtttatcgtgaggcgaatatgaagttgtttgtcttctttgttgctgcagtagtcttggtagcatggccatgccatggcgcaggctaccaaaggttccctctccgaatgaaaactggctatggtgagcgttcttcgaggtaaaatgcgcaagtcttaggcttgctgtggaagcacacaacatccgagactttaaaaccattcctgaagagtgcgttgaaccaacaaaggactacattaatggcgaacaatttagatcagactctaaaa

SEQ ID NO: 15206 - DNA, 254 bp, Glycine max
  Clone ID: 701069793H1
atcggctcgaggccgaggcgagttgtgaatgtgagtgtgttttctcttcaaaacgctctcgcggcaacacacagtttatatgttcttattctgtattgtgttttgttaatagtgagatgagtcgtgtgaacatcgacaacgtcacgtcctgtttaacaatggttcctttgtgactctctttaagttcgagatttcgtacgagtgtatcaccgctctcaaagatgatttggaatggaatctcatttatgttggat

SEQ ID NO: 15207 - DNA, 150 bp, Glycine max
  Clone ID: 701069795H1
ctcttttctcttctctgtctaaggggtgcctgagatcacattgaacaatggtgaaggtgtggccgtctggcagatgagggtcatggatatcattcgttcagaggatggcaacacgaactggtcctcgtggctacctgctcaggttcatgt

SEQ ID NO: 15208 - DNA, 266 bp, Glycine max
  Clone ID: 701069801H1
caatttctcattctcccatttcctctcagaaccctcgatcactcccacgcgctcctatatcctctccttcatcgtcgctctctccaacgatcacaacaacatcgtcatcccatggcaaacgccgcatctggtatggcagtccatgatgactgcaagttaaggtttttggagctgaagacaaagacgacacaccgtttcatagtttttgagattcaggagcagcataagcacgtcattgtggagctgttagtggtcagcaaaggcta

SEQ ID NO: 15209 - DNA, 270 bp, Glycine max
  Clone ID: 701069802H1
gattttccatctcatggtccagaatattccccaagggcaagggagcagttaacaccttgggggtcaagttctacaacgatctcattaatgagattatagcaaatggcttaaagccatttgtcacgctgtttcattgggacctcccacaagctcttgaagatgaatatgggggatttctcaaacctgaaatagtggaggacttccgtaactatgctgacttttgcttcaagacatttggtgatcgggtgaagcactgggtaaccctaaatg

SEQ ID NO: 15210 - DNA, 270 bp, Glycine max
  Clone ID: 701069803H1
cgccaacctagtcttattcatcaactcggccgaaaacttttccaatgcggcaggccgcagaccctgttcgtggaaataccccatccaatggccgctcctagaggacaccaacaccaaaacaaacccactaagatggcttcctttgtatccttcctagtgctgcttcttgcagcccttatcctcatgcctcaagggcttgctacttactacaaaccaattaagaagccaccagtgtacaagcctccagtgtacaagccaccagtgtacaaa

SEQ ID NO: 15211 - DNA, 98 bp, Glycine max
  Clone ID: 701069804H1
gtaaattacagcaacgatgtagtcttcctctctcatttgttttaatatcaagttattcaaatcatttcatttaatgcttatttggggacgtgaatcac

SEQ ID NO: 15212 - DNA, 266 bp, Glycine max
  Clone ID: 701069805H1
ctaaggaataccaagattaccaccagaaagcaatgggcggtatactttctgcgcttcttggcggcgacgcggcggcggcggagtcttcgccggagagttctacttctagagtctcctccttccactcgtcgccgcgctggcagctctacttcaacgagatcaaagataccgataagctcgttgtgatagatttctcggcgtcgtggcgcggtccttgcaaattcatagagccagcgattcacgccatggccgacaagttcaacgac

SEQ ID NO: 15213 - DNA, 245 bp, Glycine max
  Clone ID: 701069807H1
ctattctctaacatcacaatttcaattgtattccttttacataatcatggccatgaaacgtgctgttcaatccctgcttgcctcatcttccaccctcaccaggtaccttcatgcctcaggagcaaaaaagaagattgtaggggtgttctccaaagggaatgagtatgcttcgaaacccaatttcgtgggatgtgtagaaagatcattgggaatacgttagtggtctcgatcatagggtcacaagc

SEQ ID NO: 15214 - DNA, 254 bp, Glycine max
  Clone ID: 701069808H1
ttcagaaacatgaagacggtttcacccttggcattttccattctctttttcgccttcaccatagacccctttattggcattgctgcagcagcaccagaagcagtgcttgacacctcatgcagaagctgagaacaggtgtcaagtactacattctgccagtgttcagaggcaaggtggaggctaacagtttcaagcgtggcaacaacaatccccctcctgggtgcaagagcgctgagtctcaaggacccagttac

SEQ ID NO: 15215 - DNA, 276 bp, Glycine max
  Clone ID: 701069809H1
gtgacgtacgtagctgcaattgtgacactgccacagattctgaacacatgcaatcaagtttggagtcacttctttctacctagttttttctacttcttttaagtaaaatgacatgcagctaaattatttggaacatatataatttacccttaatatttctttttcatgtttacatataatgactagatataattactattagagcgtgtttagatctaccttgtatttaaaaattgtgccatttccacattaattaacaagccactttctatggtt

SEQ ID NO: 15216 - DNA, 233 bp, Glycine max
  Clone ID: 701069810H1
ctttgtcattagcacttcttcttttcacactgccgctgcaacaatggcttcagagaagaaactttcgaacccaatgacggagataaaagtgcagaagctcgttctcaatatctctgttggcgagagtggagatcgtctcaccagagccgccaaggtgttggaacaagttagtggccaaaccccagtcatttccaaagcaaggtacactgttcgttcctttgggattagaagaa

SEQ ID NO: 15217 - DNA, 277 bp, Glycine max
  Clone ID: 701069811H1
atggtggtgaatgtcttggcaggaggagctggagagaaatcgaaagacatcaggttccaagtctgatggatctgcaagacggatgaaggaagttgcatgtcccatttgcactgtccatctgcaggttcaggtgcctagctcgggttcagagacaattgagtgtggagtttgccagcacccatttcttgcgagcgctcattgagttcagataaacatgaatacggaagcggtgtctacgtgtttcataagtttaaaatgcatttgttttactgatcta

SEQ ID NO: 15218 - DNA, 276 bp, Glycine max
  Clone ID: 701069813H1
caaccggcttgtgagacttgtctgtgtttttctgcaaagcctcattcggaacaacattattaatgtcaaagatctcttcattgaagttcaagcgttttgcatcgagttttcacggattagagaggcagctgcgttatttaggctgctcaagtcattggaatgattttagtctgtcaattttctcctctcttctgttctatttcaagactttctgtagatatgtatctacctagagctaggtagcgttatgtactcattttctagttgtggacaata

SEQ ID NO: 15219 - DNA, 275 bp, Glycine max
  Clone ID: 701069815H1
agagtttgttgtgagctataagctagtttatcgtgaggagaatatgaacttgtttgtcttctttgttgctgcagtagttttggtagcatggccatgccatggcgcaggctaccaaaggttccctctccgaatgaaaactggctatggtgagcgctcttcggaggtaaaatgcgcaagttttaggcttgacgtggaagcacacaacatccgagcctttaaaaccattcctgaagagtgcgttgaaccaacaaaggactacattaatggcgaacaat

SEQ ID NO: 15220 - DNA, 279 bp, Glycine max
  Clone ID: 701069816H1
ggatttgttacatcaaaagtagcatgttgcggtcaaggaccctacaatggtcttggactgtgcactccggcatccaacttgtgccctaaccgtgatatttatgccttttgggatccttttcatccatcagaaagggctaataggttaatcgttcaacagattttgtcaggcacctcagagtatatgtatccaatgaatcttagcaccattatggctttggattccaagaactagatcaatcaatcaagggtctctgtccatcattttattaccgcacct

SEQ ID NO: 15221 - DNA, 269 bp, Glycine max
  Clone ID: 701069817H1
ctctggtctgcaactatgagcaacgattatctaatcatactttctctccttctttccacggtgcttgcaactgcaagttcttcttcttcttcttcctccctctatcttgggaagggcttctcacatcgcaaattgtctcccagttatcacattcacaaaaccattgacgaatcctatgcagttatcttcgatgctggtagcactggaagccgtgtacatgtctatcgttttaaccaacaattagatctcattcgcattggccaagactt

SEQ ID NO: 15222 - DNA, 263 bp, Glycine max
  Clone ID: 701069819H1
acggcttgttcagtctttcttggaactttgttactctcacacatgtctcgctccgtgcctttggtttcaaccatttttctcttgcttctgcttctggtggccactgagatgatggggccaacaatggtggcagaagcaagaacttgtgagtctcagagccaccgtttcaaggggccatgtttgagtgacaccaactgtggctctgtttgccgaaccgacgtttcaccggaggacatgccgtggcttccgtcgcagatgcgtct

SEQ ID NO: 15223 - DNA, 252 bp, Glycine max
  Clone ID: 701069820H1
attcacaaccttaaacctttctttcttgtaaactttattgattgattctgagaatagaactaagagggtatagaccatggatagcgcaattgaagcttcttttttggttctgcttctgactttccccactgtatttggagctgaccatgaagttggtgcaactagtggctggcgacctcggagttaattaccacactgggaatctgggaacactttcacaattggtgacaatttggtgttcaagtatgactc

SEQ ID NO: 15224 - DNA, 270 bp, Glycine max
  Clone ID: 701069821H1
attctccacatggtagcccagacaggaagtatcgctcgcggatctaggtgatgtttatcttagcattctactatttgaacaaggtaagcaaaaatttgttgactatatggtgctgtgactaccagtttgaccctatatacaatgtatacgtttattggtggaagctgctgttcctgtgtgactatcagtgtgccttttctcgaagtcacacagaaagttagagtggacaaaagtgtggaaatctgaatttgaagtatgtaagcatttgct

SEQ ID NO: 15225 - DNA, 269 bp, Glycine max
  Clone ID: 701069822H1
ataatgtttacctcttcttcattggcttgctgacttttggaatagttgattctcttgcctcatcctcaggtgctgattggaaaaaagttgcagttcttggaggtattcttgtggtcttgttttctctgttcatcaatgaacaaaacaaggacaacaagaaagactaacaatgaaaaaaaaaaactcaagttcatttcttatgttgatcaaataataagaagtttcttgggggaagacattgtgaataggtattgcatgattgaatatat

SEQ ID NO: 15226 - DNA, 265 bp, Glycine max
  Clone ID: 701069824H1
cacatagagacacaatacagagtgagttgttgctccttcgccacaactctctgccaacatgggtatctccagagattctatgcacaagaggcgtgccactggtggcaagaagaaggcatggaggaaaaagaactagtatgagcttggtcgccagcctgataacactaagctgtcaagcaacaagacagtcaggaggatccgtgttagaggtggagatgtgaactggagggcattgagattggatactggaaattactcatgggga

SEQ ID NO: 15227 - DNA, 272 bp, Glycine max
  Clone ID: 701069825H1
ccattattaaggcctcagtttgttatgttcggttcttccattgttcagtatggtctttatgatgaaggttggatggctgatctttctcacttgtatgctcgcaaggttgatatagttttgcgaggatatgctggttggaattcaaggcgtgctctgcaggttctggataaaatctttcctaaggacgcccctgtacaaccttcattggtcattgcctactttggtggtaatgattcttctactccccactcatcaggcctaggtcctcatgt

SEQ ID NO: 15228 - DNA, 276 bp, Glycine max
  Clone ID: 701069826H1
cggtaatgggtttgcgatcgtggtggctgattcatcggcggtgcacagcatcctcgtccacaagtccaacgaggacaagatcatgctcctcgattcccacaaactcattgccgctagcggcgagcccggagacagggttcagttcacagagtacattcagaagaacgtcgccttgtatcacttccgtcaaggcatccctcttaccaccgccgccgccgccaatttcacgcgtggcgaactcgccactgctctccgcaagacaccatactctgtgaa

SEQ ID NO: 15229 - DNA, 277 bp, Glycine max
  Clone ID: 701069827H1
ggttagctaagaagaaaataggagagggttagtttttaggggctgcggaaaaaagatagtgagtggtggccaatgggagcggagaggttttcccacgaccatgctcccttgattctgggtctccagccatccgccctggtcgacaacgttgccaccgtcgattggtccttgctccatcgcattcccggcgagcgcggtggctccatccctgtccaaattgaagaactggaatccatactcgagagaggttaaatccaaatcccacgatgacatcaaa

SEQ ID NO: 15230 - DNA, 277 bp, Glycine max
  Clone ID: 701069828H1
cagagagaaaagcgtgaatcatgtcggacgaagagcatcacttcgattctcaggcggatgcgggagcgtccaagacgtatcctcagcaggctggtaccattcgcaagaatggctacatcgtcatcaaatccaggccttgcaaggttgtagaggtctctacgtcaaagacaggcaagcatggacatgcacagtgtcactttgttgcaattgatatttttaatgggaaaaagcttgaagatattgttccatcatcccacaactgtgatgttccacatgt

SEQ ID NO: 15231 - DNA, 279 bp, Glycine max
  Clone ID: 701069831H1
cgtccctccttcctctggcttataattcttgtgacccttttcgctggtagcattgaaagtgcaccagcacacgtgaacgcaagccaatatgctgcacccttcaataggagtgtttttccttctggttttctatttggaataggctctgcagcttaccagatagaaggagcagcagctatagatggcagaggcacaagtatatgggacacctatactacatagccaccagcgacgatttgggatcatcgtgatggaactctagcagttgatttttatcac

SEQ ID NO: 15232 - DNA, 281 bp, Glycine max
  Clone ID: 701069832H1
cattttcactaggtcccgttgtgtgtgcacggaatcaaatttctcatcgacgatggcgaataccctacaacgcgccctacgcgccaccatggcccggcggttcatcaccgacgcattggccggaattaaacgaggcgagatcggaatggtttctggaattcctcaagagcaccttcgtaggagagttgtaatctactctcctgctagaactgcatctcaacagggatctgggcaggttggacaatggaagatcaacttcttatctcaccaaaagtgggaaa

SEQ ID NO: 15233 - DNA, 188 bp, Glycine max
  Clone ID: 701069833H1
aatgggagcactatgctaagctaactgctgaagttggagccaatgtacaaattgttggtgatgatctcttggttaccaaccccaagagggttcagaaggaaattgatactaaagcatgcaatggtcttatcctcaaggtcaaccaaattggttctgtgactgagagtattgaagctgtcaggatgtcc

SEQ ID NO: 15234 - DNA, 169 bp, Glycine max
  Clone ID: 701069834H1
taatcggtggaaacaggtctaagttttctgaatttgtttaaagcggcggtgccgccgtgccggctctcactgtgaactgcacgtatctcttctatctcaggcctgcagcttcgactccgccagcagttgcacaccaccacgcaaccaaacatggcagattcgatttgca

SEQ ID NO: 15235 - DNA, 266 bp, Glycine max
  Clone ID: 701069835H1
cggctcgagggaggatgaacttatgatggtcgggtctctgactccaaatattggggatggaattatgaacccaaaggagaaaattgatattgaaatgggatctatgcgtgcagaagatggacgtatgcctgttcctgaacttctgcgaaattttgattttgataattttgatggtgacatgaagtttgcagacgacgacgggcagccttcttttgatgcattctacagtattgaagatgatgcaaaagattcagcccgatcatcca

SEQ ID NO: 15236 - DNA, 264 bp, Glycine max
  Clone ID: 701069836H1
tgtgttcacttgatctcatcataatcgtcagcgtcaattgaagaagatgccgatcagaaacatcgccgtcggaaggcctcaagaggcgactaaccccgacacgttgaaggcggctttcgctgagttcatctcaaccttcatcatcgtgttcgccggctcaggctccggcatagcctacaacaagctcaccgacaacggcgctgccacccctgacggcactcatctccgcctccatcgcccatgcattcgccctcttcgtcgccg

SEQ ID NO: 15237 - DNA, 266 bp, Glycine max
  Clone ID: 701069837H1
ttccgccaagagcattccaagccacgcactcgcaactggtgtgaacgattttcaagctgtagtgttagagattgtaatcacatttgggttggtttacactgtgctatgcaactgcagcagacccaaagttcgggtcattgggtatcattgcacccattgctattgggttcgtagtgggtgccaacatcttagcagcaggcccattcagtggcggttcaatgaacctagctcgctcattcggcccagtgtggtcagtggagattcgc

SEQ ID NO: 15238 - DNA, 269 bp, Glycine max
  Clone ID: 701069839H1
gagcgagcgagcgagcagtttcaaagagaggatttgggattgggaaggcgagggattgcgctgcgtctcttcctcttctctttcgattcatccctcattcataatcttccaatccaacaacctcagcctcacactcacacatacacacatctgaacgcgtatcgtccctcccatggcttcaaagcgcatcctcaaggagctcaaggactcgcagaaagacccaccaacttcttgcagcgctggtccagtagctgaggacatgttccatt

SEQ ID NO: 15239 - DNA, 261 bp, Glycine max
  Clone ID: 701069841H1
cctaaagaccctcatggctaatagacgttatccactttcaaacatagccagccaatccagaccagccgaaatctagaccaaatcagagaacaaaggatgatgtggaagataagacgaagccttcagcacttgaagttgcaaccttgctcgatcctcatcatgggccacatttttactcatcactctccctctccactcatcaacatgcgaccttcaccctcaagaattctcatggctcgctatccccaaaccaagtcacat

SEQ ID NO: 15240 - DNA, 204 bp, Glycine max
  Clone ID: 701069842H1
ctcgctgcagagctgcgcgttgatctatcgcagtggcgaggataaatgcgtacgagttactgtctaagacgatggcggagctactgatgcagatctaggatctcaaggcggctctagccctgcttcgcgtccgcaaggttacaggcggcgccgcgatcgagctctccacaattaaggtggtgatgctatccatagcgcaggttt

SEQ ID NO: 15241 - DNA, 277 bp, Glycine max
  Clone ID: 701069844H1
atcccaccatcatcatttggtgcttcttgacaacacaaaatcactttcaaaggcttgacaaagaaaactgaaaccaaaccaactttcccctttcactgatcatggcttcttctctcataatttccccaagacagcttcgctctgatttgtactcctactcctaccaagaggatcattacagcaccccactggtgatcaatgttctggcttcactgattgagaggagcatggccagaacagaaaggatcgtgaagaatggttcgaggtctttgtccaa

SEQ ID NO: 15242 - DNA, 277 bp, Glycine max
  Clone ID: 701069845H1
agcagaaggaggagaagcagaaagaggagacgacacaatggcgccgaagaagccccgaaccacgtcgaggaaccctgatttggtcaggggaattggcaaatattcgaggtcgcagatgtaccacaagccgggcatctgggccatcaaggccaaaaacggcggtgttttgcccctccacgatcccaaccccaaacccgaggccccggcccagaagccgcccaagttctacccggccgatgacgtgaagaagcccctcgtcaacaagcacaagcccaag

SEQ ID NO: 15243 - DNA, 271 bp, Glycine max
  Clone ID: 701069847H1
attctcttcttctcgtgccataacacaaaaatcttctgcttctttatcatcacctatgcttgtcaaatccatggccactcccaagcctcttccctcagtctctagaactgtaggctctagaaagaactcaactgtgttcccacttggggcacaacctaggagcagccccgcgacagccaagcctcccacaaagcttttgacaaggatcgagtagctgaagctgctgagcaaaccagacaaagcaggttgctatctgcagcagcgaagtttg

SEQ ID NO: 15244 - DNA, 254 bp, Glycine max
  Clone ID: 701069848H1
agtgaatacctaattcggagggtttcagttttcgccctcttttctcatctccaacatcttcgtcgtcacggaggctagtcttcctgttatacaaaacaatgtctgacggtcaagaatcagacaagactattgagatatggaagatcaagacattgataaaggcattggaagctgctcgaggtaatggcaacagcatgatttctcagataatgcctccacgtgaatcaaatatctcgggtcactaagatgttggg

SEQ ID NO: 15245 - DNA, 265 bp, Glycine max
  unsure at all n locations
  Clone ID: 701069850H1
tgctagtttatcgtgagcagaatatgaagttgtttgtattctttgttgctgcagtagttatggtagtctggacatgccatggcgcaggctaccaaaggttccctctccgaatgaaaactggctatggtgagcgttcttcggaggtaaaatgcgcaagttttagggctgctatgggagcacataccagccgagccgttnnaaagcattgtgaagagtgcgttgaaacaacaaaggactacattaatggcgagcaatttagatcaga

SEQ ID NO: 15246 - DNA, 210 bp, Glycine max
  Clone ID: 701069851H1
caaaataatggcacctgcaacacatagtctctatctgctcctcctgttctcactctgcatcgtcgctaccgcgagatcgagcgacatatgtaccgactgtgtgtacacggcgtcacgttagaaacggttcggtgttcgaacggggccacgagatcggagatctggattagtcggaacgaatagttgggttactccatctgcactggaaac

SEQ ID NO: 15247 - DNA, 258 bp, Glycine max
  Clone ID: 701069854H1
cgaacattcgacaggtagagtttcttcaatggctcctaaagttgataagaagaacgacccaaaggcacaggccttgaagactgctaaggcagttaagtctggtgctacctttaagaagaaggcaaagaagatccgaacttctgtcactttccacagaccgaggacatcgaagaaggataggaaccccaagtaccctcgcattagcgcgcctccaagaaataagcttgatcattatcagatcctgcaataccctctgac

SEQ ID NO: 15248 - DNA, 53 bp, Glycine max
  Clone ID: 701069855H1
atcagtttcgtgtttcaaaaaaaaaaaaagaacaacagaagtaaagaagcaca

SEQ ID NO: 15249 - DNA, 55 bp, Glycine max
  Clone ID: 701069856H1
agttcaggcatcgagcggggtgtcagtgtttgtgcgtgaagattccacgatggtt

SEQ ID NO: 15250 - DNA, 277 bp, Glycine max
  Clone ID: 701069857H1
tcagttctccgctagctgtcaagacgctctatacgtgtagtgctattctgcgtcttgccgcttcactctcagatggctcgtgctgataactagacagttggagattctggcgcgtagagctgaaacactgttgcctggcccagaggaaagcactttcgggctggcgatgcacgtgcttgcaattatagccctgggactcacaacctggtggccgtgaacaaggcttgatctgatagctggaagagtccaagaggaaccacagtgtacaagtcaagga

SEQ ID NO: 15251 - DNA, 139 bp, Glycine max
  Clone ID: 701069858H1
cagaagaagaggatcatggtgatggtgcacgtgatcatgtcgagaagtcactgcagcaacagagagtgtatagacgagtcactcttgaaatcagaactcagctcagagcaccgcgtgccgagttctcctttctccgtgt

SEQ ID NO: 15252 - DNA, 274 bp, Glycine max
  Clone ID: 701069859H1
gtttgttgtgagctataagctagtttatcgtgaggagaatatgaagttgtttgtattctatgttgctgcagtagttttggtagcatggccatgccatggcgcaggctaccaaaggttccctctccgaatgaaaactggctatggtgagcgctcttcggaggtaaaatgcgcaagtattaggcatgctctggaagctttcaacatccgagcatctataaccattcctgaagagtgcgttgaagcaccaaatgactatattaatggcgaacaattt

SEQ ID NO: 15253 - DNA, 276 bp, Glycine max
  Clone ID: 701069863H1
ctagcaaggtagcgtcttgaagagtttccaagccaaaataatgtgttatagggtggactgtaaaacctgtgggaagtatacatgggggggatgtggtgatcacttgaccaccctctacgccagcattgatgagggaatgcactgtacgtgccgctcctggccgggtgttgttacacgcacacgcacacccaccactcagcaacctactcaatccaataatcccaaccaagggaataggaattctcaaaattaacgaagctgcgttggattctgcta

SEQ ID NO: 15254 - DNA, 280 bp, Glycine max
  Clone ID: 701069864H1
cgtgagactgatggcgtgcgtattcggattggtgggtaatgggcttgcgatcgtggtggctgattcatcggcggtgcacagcatcctcgtccacaagtccaacgaggacaagatcatgctcctcgattcccacaaactcattgccgctagcggcgagcccggagacagggttcagttcacagagtacattcagaagaacgtcgccttgtatcagttccgtaacggcatccctcttaaccacctcgccgccgccaatttcacgcgtggcgaactcgccact

SEQ ID NO: 15255 - DNA, 65 bp, Glycine max
  Clone ID: 701069865H1
agatgaattctcgctgttcggtgctctctcagtgaccagagacagatgatgatagagatggcgaa

SEQ ID NO: 15256 - DNA, 272 bp, Glycine max
  Clone ID: 701069866H1
tacaaaacaaaacagagcaaagagagagtgtgtgaaaagtgaaacaaaaaacagaacaacaatggcgacacttaaggttcctcagcctcttccccccgttgcagatgattgtgagcagctccgaaaagccttctcaggttggggaactaacgaggagctgattgtatcgatcttggctcataggaattctgctcagaggaagcttatcagagaaacttatgcccagacctatggagaagatctcctcaaggccttggacaaagaactcacga

SEQ ID NO: 15257 - DNA, 271 bp, Glycine max
  Clone ID: 701069867H1
tattggttgtgatgcaaaggttgctttggacattcataatctgcgtgaagagaatccagataagttttataaccagtttatgaataaagttctatatgcaagagaaggtgctaaaagtattatggataggacatttgcagatttaccttggcagattcgagttgaggttgatggagttgaaattgaggtccctgaggatgcggaaggtgtgcttgttgcaaatattggaagctacatgggaggtgtagatttgtggcaaaatgaggatgaa

SEQ ID NO: 15258 - DNA, 219 bp, Glycine max
  Clone ID: 701069870H1
tagaatcaaattctgtaggtatacacgtttctgtttaaagatctcaatgggagtttgttctacaattatggatgagtacagttatcttgtaaactagaaatttggattaacaatgtaacaattctctgtgaaaaaaaaaaaaaaaaaaaaaaaaaaaaaaaaaaaaaaaaaaaaaaaaaaaaaaaaaaataaaaaagactaaaaaaaaatacacggata

SEQ ID NO: 15259 - DNA, 274 bp, Glycine max
  Clone ID: 701069871H1
cgcatttcatccaagcctaaacctaagaagaagaagaatgaaatcactaagaggaccaagctgactaatgcccatcttccggagctttttcagaacttaaagtaaacaattcctgactcaaggaactcgtggcaattggtgaatgaattcacatagctcatttgttgacatacagcatgtggatagaaagtcttcatcgttcagatggatatgcgctttttattgtattagcatactgcttctggttttggatgggtacccaattggatggtaa

SEQ ID NO: 15260 - DNA, 246 bp, Glycine max
  Clone ID: 701069872H1
ctctttcttggaactttgttactctcacacatgtctcgctccgtgcctttggtttcaaccatttttctcttgcttctgcttctggtggccactgagatgatggggccaacaatggtggcagaagcaagaacttgtgagtctcagagccaccgtttcaaggggccatgtttgagtgacaccaactgtggctctgtttgccgaaccgaacgtttcactggaggacactgccgtggcttccgtcgcaga

SEQ ID NO: 15261 - DNA, 88 bp, Glycine max
  Clone ID: 701069873H1
tataaaggtctagttcctgcgtatccaaacgagtccttaatatcgaactttcctgaagatggtgttgatatagcatgaagtagatgca

SEQ ID NO: 15262 - DNA, 273 bp, Glycine max
  Clone ID: 701069878H1
attgagtgaagcatgtgaattggcatgggattttgaagtgcaagatctggtcctctcaaatggtgggggtaaaatgtcatgttgttatgttgatgatggaatgccgtatgtggaaaaagcaagcaagctggatggagtaggtcacggctcacgaagatagagatgatttggattcctcaatttcggaagagaaatcgaccagaccattgatgtgcctgaattgtgtttactaatttgtttgtacccttgtgtttataatctgacaaagttgat

SEQ ID NO: 15263 - DNA, 273 bp, Glycine max
  Clone ID: 701069880H1
atcgagaacaatcttctccccatcaaaccctaaccctaactcacagatttgagttttgatcacaccaaatcaatcaatcagtccgagaaaatgcttcactctccacggcactcgacgctccacatctcgtcgccgtccccttcaatttcccaggcatcggcgcaaaaccctaacgatccaccatcatcatcgtgtgcgaacacccagcggtgttggacgacgacacgtacgttgcacgccctcgagaaatcatcgcgcgcgactattccccga

SEQ ID NO: 15264 - DNA, 272 bp, Glycine max
  Clone ID: 701069881H1
cacgaaactcgcaaattccctcaacactggagtcgctggaaaattcattctgggactcagctgagctgaccaagcatgattcaaaatggttgcattgtatcccaagggtgtgcccctctgaattctaggtcacgcaaccatggcatacctagtacctctgcctttcgttgcgcttctctaatgcctcccaaggttgccgtctctaacatccggagcttttggggacataatctggaatgtaaacccttgttgccaagaggaatgacattgac

SEQ ID NO: 15265 - DNA, 274 bp, Glycine max
  unsure at all n locations
  Clone ID: 701069882H1
aagcttccaaaccctaacactccccttcctcttcgatcatcanctctccacaatgccgccgaacctagantcctnnnagatagtcgacgtcttcgtccgcgttaccggcggcgaagtcggcgcggcgagttccctggccccgaagatcggtcccctcggtctctcccccaagaagatcggagaagacatcgccaaagataccgccaaggactggaagggcctccgcgtcaccgtcaagctcaccgttcagaatcgtcaggcgaaggtcacggtg

SEQ ID NO: 15266 - DNA, 272 bp, Glycine max
  Clone ID: 701069883H1
taacatactcaaacatatgcgcgaatctgctcaggaattgcctcaaggaaccctacaaggccgaatccctctctcgtgagaagctccattttgttctctccaaatgggtcgacgccaagcctgaaaaacctactattcgttcagacaccccagagcagtgatctggaatagttggaagctataaatgcataaatctttgagatctggaagttcattgtcattttgaacctttctgtgatgtttaattcctttgtttttttctctccatgaaa

SEQ ID NO: 15267 - DNA, 269 bp, Glycine max
  Clone ID: 701069884H1
cctattcattttcccaagagggaccctgcaacatcccctaagttgtggccaagagaagaagcagactcacttcctttctcactgaacaaattcccaaaccttctcaaaatcttctctgtaactcaaaactctcccaaagccaaggccatggaagatacccttagggaatgtgagaccaaacccatcaaaggagaggtaaaattctgtgccacctctttagaatccatgcttgacttcactcaaagcattcttggcttcacatctgatct

SEQ ID NO: 15268 - DNA, 272 bp, Glycine max
  unsure at all n locations
  Clone ID: 701069885H1
caaagccagccagcagtccccattgctgtgccagtgaagcattcattcattcatcttctaaaactttgatcatttcgtggatcttctgattcttcgatctcgattctggttagggtttacggttttctgaagagaagagaagtttgcccagaatggggattctggttccgcttttcatccacgtcgtcgctttcatttgcaccgttgcagctatcgctttggccgttcttcacatttacaggcactntctcagttacaccgagcccacttat

SEQ ID NO: 15269 - DNA, 274 bp, Glycine max
  Clone ID: 701069886H1
agggattttgattggggatggcttcgagcatccaacaagtggaaggggacgagtcagttgtgctgcgcgtgactcattccaatctcaaaaccttcgcctccgacatccgcttctcgcttcacctcaccgtcgaagccgtcaaagacaagctctggaaaaaatgcggcacctctgtcaactcaatgcacctccaactctacgacgacgctcgcaacaaaattgccgatctctctgatcattccaaaccccttgccttctattcccctcttgatgg

SEQ ID NO: 15270 - DNA, 227 bp, Glycine max
  Clone ID: 701069888H1
ggggtgtcaggattgtggtgaagattccagagggtttggcgccagagcaagtcgcaccattactgtgtgcgggtgtgacagtgtacagtccactggtacactttgggctgaaagagagtgggctaagaggtggaatattggggcttggaggagtgggacacatgggggtgaagatagcaaaggcactgggtcatcatgtgactgtgataagctcttctgacaagaag

SEQ ID NO: 15271 - DNA, 233 bp, Glycine max
  Clone ID: 701069890H1
agcaacttcaggtttttgagtctttgcctcttggcattgattgcatcatctcatgctcaacttcagcttggtttttatgccaagagttgcccaaaagctgagcaaatcattttgaaatttgttcatgaacatatccacaatgctccatcactagcagctgcattgataagaatgcacccccatcactgttttgtaaggggatgtgatggatcggtgcctctgcaatcaacaac

SEQ ID NO: 15272 - DNA, 221 bp, Glycine max
  Clone ID: 701069893H1
atcgatacgttgaagagcaggggctatgtctaatttctctgatactgtagaggaagtgagtagaatgttacaagtggtggtggcgttaatattattgttctgccattgctttgagtattgttatgcatttatgttttactaggtttgtgtgtgatttggtgaatgatctagataggtattggtagggtgtagtatatgttggaagttattattgatatatg

SEQ ID NO: 15273 - DNA, 277 bp, Glycine max
  Clone ID: 701069894H1
cttttacttctcagcagcttcggctagggttcagaaacgaaaaaggcttcggtgttctgttcgcgatgagagccaagtggaagaagaagcgtatgaggaggttgaagaggaagcgccgcaagatgagacagagatccaagtagtgcgttaaacctagtttgtttctgttgcttttacaattgcttcatgttgtcgaatgggacacccagttcgttagtggcactggtttctcctttcttgatgtctgatacattttgttggattcacgtagtttatg

SEQ ID NO: 15274 - DNA, 274 bp, Glycine max
  Clone ID: 701069895H1
ctcatactgtgatgactacttcaaactcacatacccctgtacacctggtgctgagtactatggtcgtggagctattcccattttctggaactacaactatggtgctgttggagaagctttgaagatcgacctactcagccatccagaatacatagagcagaatgccacccttgcttaccaggctgctatttggagatggatgacaccaatgaaaaagtcacagccctctgcgcatgatgcctttgtcggcaaccggaagcctagcaagaatgat

SEQ ID NO: 15275 - DNA, 280 bp, Glycine max
  Clone ID: 701069896H1
caaacccaaataggttcccaataagaaagaagagtcatcacaaggaaaaaggggaaagaaaagatgccttgcctttacatctccaccaacataaacttagatggagttaacatcgatccaatcttttctcaagccaccactgcagtttccacaatcatcggcaagccagagaagtttgtgatggtcatcttgaaggggtcagtgccaatatcttttgagggtaacaaagaaccagctgcatatgctgagatagtttcaatgggtggtataaatccagaag

SEQ ID NO: 15276 - DNA, 186 bp, Glycine max
  Clone ID: 701069901H2
aagctccctcgcacaaagcaatgcctgccatcacctgaattctatgctccttttccctttatccgcattgctctcttctctttcaccgttttttgtctctgaatatccaagatcttcaaggacaatgttatctctgagaaacattactctgaatagcgcttgatccggcgtgaaacattcaattgt

SEQ ID NO: 15277 - DNA, 182 bp, Glycine max
  Clone ID: 701069902H2
actctcttttccattccatgtgcttattttccaattgaaaatctagcatttctcgagtatcgacacttgatgcttaatcaaattgttacattgcttgaagtatgtgttggtggttatccttatgtcttgtatcaatttgtgcttgaagtatgatgatactcgagaaatgtgagattttcaat

SEQ ID NO: 15278 - DNA, 182 bp, Glycine max
  Clone ID: 701069903H2
gatgatttcttccttcaagctctcccatttaagttgttctatctctcctctttcaacccaaaagcaagtaggttcaagtctctttcaatccttcccaaccaaaaccttaaaattctcagctactcctcaagtatctacatctagaagaagtaccaacaagactacaaccactgcattcttct

SEQ ID NO: 15279 - DNA, 178 bp, Glycine max
  Clone ID: 701069904H2
gttgaatgccaggcaactttgccaaaaggagttgacatttgttgcatctgccaccacaagcatggtgtatgcatgaagtgttgctatggccattgtcagaccacattccatccatcctgtgctagaagtgctggtttgtacatgaatgtgaggactactggtggcaaggctcaacaca

SEQ ID NO: 15280 - DNA, 269 bp, Glycine max
  Clone ID: 701069905H2
atttgatgcagaacttgagacaggcttatgagggaacattcatgtgtagtggtggctttactaggaagttgggaatggaagctgtagctgaaggccatgctgacttggtatcctatggtcgacttttcatctccaatccagacttggttttaaggcttaagcttaatgcacctcttaccaagtataacaggaagacattttacacccaggatcctgttataggatacacagattatcctttcctaagcaaagaaagtgagacaaaggag

SEQ ID NO: 15281 - DNA, 312 bp, Glycine max
  Clone ID: 701069906H2
caaacagggaatataagagagaaaaagatgggtttcataatggaattcgcggagaacttggtattgaagttgatggaggatccgaagaaagggatcggaggttccgggagcacgtttatagagtgaaggacaggtgcgagaagacgaaggagatgtggagctaccctatgcgaccctatgggttttggactttcgaacgccacaattctcagcttgcttgggatgcacagattagccaagtggctgggaggagggaccttatgatgatatcctccaacattctctaccccacctagtgagtgtgctgaactg

SEQ ID NO: 15282 - DNA, 273 bp, Glycine max
  Clone ID: 701069907H2
gtgccggtgcaatctgcggtgctgggttggccaaagggttccagaaatcgttctacaacaggtacggaggtggggttaacactgtcagcgatggctacaacaaaggtaccgctttgggtgctgagatcattggtacctttgttcttgtctacaccgttttctccgccactgatcctaagaggaacgctagggactctcatgttcctgtgttagcaccacttcccattgggtttgccgtcttcatggttcacttggctacaatcctgtcactgg

SEQ ID NO: 15283 - DNA, 179 bp, Glycine max
  Clone ID: 701069908H2
ccaaagtgcttctctcctctgtctttttctctctcttgctatccttttggctagtcgcactgctgcaagtgcaactccaagaagcgcagtgccaagccaccatgtttcaacattcaacagaagcctttttccttccacttttctctttggacttggttcttctgcttaccaggcagaag

SEQ ID NO: 15284 - DNA, 316 bp, Glycine max
  Clone ID: 701069909H2
acgatctcaacggagcacctctcttcaggtcgccatctagactgcaatcatggctgatggaccacagcatccatcagttgttcagaagctagctggacagtcttacctggtgtccaggctaagccccaactttaactctgggaattattcctcgactggttcttacttcaatggaggcctgcactcttctgggttggctgttgtgtcgcctggatctccagttactgtgcatgctccagcagagaaaggagtgactggatttctagtggattctctgatgggtggagtgtctgctgctgtgtcacagacagctgct

SEQ ID NO: 15285 - DNA, 313 bp, Glycine max
  Clone ID: 701069910H2
tcttgaactcaaggagatggctctgggaagaggcagtgcagtggttctactactttgcttcttgctgcttcactctcagatggctcgtgctgccacctacacagttggagattctgggggttggacctttaacactgttgcctggcccaaaggaaagctctttcgggctggtgacacacttgctttcaattatagccctgggactcacaatgtggtggccgtgaacaaggctggatatgatagctgcaagactccaagaggagccaaagtgtataagtcagggacggatcagatcagacttgccaagggacag

SEQ ID NO: 15286 - DNA, 315 bp, Glycine max
  unsure at all n locations
  Clone ID: 701069911H2
ccatctttgccttctgcatgttggttctctgtaaacagatactgcaaaagaagaataatattgaatatttggttgggttgaatccctgggttgaagcgttgcagacatcacggctattctaagagtgtctcgctctctcattcatgtcccaactgtacgacggaggacaggttgcgtaactgncaccaacccttcgccgcacggtgggcgtggtgctttgccttctgaaggtggtagcccttcagacttgctcttcttagctggtggtggttctgctgtcttctagcttcttcttaactcttttttctttttact

SEQ ID NO: 15287 - DNA, 310 bp, Glycine max
  Clone ID: 701069912H2
tatcgctttgcactagcagctttgaaacccggttcatccgaagcccttcaccgaaccatgtcgaggagaaaggttagagagccaaaggaggaaaatgtgactctgggtccagctgttagagatggtgaacacgtttttggcgttgctcgcatctttgcctccttcaacgacaccttcatccatgtcactgatttgtctggcagggaaacccttgtccgaatcactggtggtatgaaagttaaagctgacagagatgaatcatctccttatgctgctatgcttgcagctcaggatgttgctgccagatgca

SEQ ID NO: 15288 - DNA, 297 bp, Glycine max
  Clone ID: 701069913H2
tctggatcctatcatcttgtggctttgatgtctagagcattggaacatgattacatagggttggcagagaatccgtcaatggacggaagctctgacaaactgtcttctgaggatggtaaaacctcatcactgaacttgaaggagacagagctgaggcttggcctccctggttgcgcgtctccagagagaaaatcaggttctgcactctgtctttttggcaaagagttgcagaacaataacaatgtttgctcagttgtaagcctttgatagctggggccagaggggttctctatgtca

SEQ ID NO: 15289 - DNA, 173 bp, Glycine max
  Clone ID: 701069914H2
cgtttttggaatcagaaaacgaatagggtttagcggacgatcatggcaccagctaggggtttcgggggcaatcgccggcagagcgttcatggcggcggcggcgaagagcgcggcgaagaagaaacccgctccgtccagcggagccgctgcgaaagccgctgtgaagaagacgg

SEQ ID NO: 15290 - DNA, 301 bp, Glycine max
  Clone ID: 701069915H2
ctgacgcagagaaagcaaaagacagtcgcagcattcgtcctggaaaggggaaaatgcgtaaccgtcgctacatctcacgccgtggaccactcatcgtgtacggaacggaaggagccaaagccgttaaggccttccgtaacgtccccggcgtggaagtcgctaacgtcgagaggcttaaccttctgaaacttgctccaggaggacactcgggaggtttgtggtttggacaaaaagcgcttttgagaagctggattcgatttatgggtcttttgataagccctctgcagagagcaagggtact

SEQ ID NO: 15291 - DNA, 316 bp, Glycine max
  Clone ID: 701069916H2
cccttttgagtcttccaagttttcaccatcgtaatgggttccgaaggatccagcgtcgtggttcctaggaatttcagattattggaagagcttgagagaggtgagaagggaattggggatggaactgttagctatggaatggatgatgctgatgacatatacatgcaatcttggactgggactatcatcggtccccctagtactgttcatgaagggcgtatctaccagttgaaattgttttgcagcagggattatccagacaatcctccatctgttagatttcaaacaaggattaacatgacatgtgtcaatcaag

SEQ ID NO: 15292 - DNA, 179 bp, Glycine max
  Clone ID: 701069917H2
tgctcttcccctgacatacgcggctcacgttctggcacttgttgccagcatcttggtcgtgctctgggtcctcaattttaggggtggcttggcttgggattctgataacaaggccctcatcttcaatcttcatcacgttcttattgtcattggcttactagtccttgggggtgaagcta

SEQ ID NO: 15293 - DNA, 310 bp, Glycine max
  Clone ID: 701069918H2
gtttgctctctcaagtctctcgaagcctctttctctctcttctagaagctatctgtgtttggtgttactaagtctccaacaagcaaagtacatggttgatttggaaatccaggtccccaccccattcgacccgtttgccgaggcgagagaatcggatgcccccggagcaaaggagtatgtgcatattcgaattcagcagaggaatgggaagaagagtctgaccacagtgcaagggctgaagaaggagttcagctacgagaagatcctcagggactcaagcaggagtctgctgcacggaaccgtgtgcaga

SEQ ID NO: 15294 - DNA, 177 bp, Glycine max
  Clone ID: 701069919H2
aagaaatttaagtgaggagctagagaatgatgatgaagtctgctatgtgtgcagtggtggttgtagcacttcttcttctggcggcggtggggcccatggctgaggctgtgacatgcaccccaacagagttgagtccgtgtcttccagcaatcacttccggtgctaaaccttccaatg

SEQ ID NO: 15295 - DNA, 178 bp, Glycine max
  Clone ID: 701069920H2
aagcaacacaagaacactctcttgaacattcatggatccagtgagcgtgtggggtaacacgcccttggcgacggtggatcccgagatccatgacctcatcgagaaggagaagcaccgccaatgccgcggcatcgagctcatcgcctccgagaacttcacctccttcgcagtcatcgag

SEQ ID NO: 15296 - DNA, 301 bp, Glycine max
  Clone ID: 701069921H2
tcgagctccgagtctgtctttgttgcgtttcgagtgtctgtggaatccctaaccctactctattgtgtggcgaaatgggatcaattggggtactcctggtggctcaggtgataccgtacctggagcaagagctggacaagcgctacaagctgtttcgggcgtatgatcagccgcagacggcgcaagttctaagccagcacgcgagctcgatccgtgcggtggtcggaaactcgaacgccggcgccgacgcggactgatcgaggcgctgcgaagctggagatctgtcgagcttcacgtggga

SEQ ID NO: 15297 - DNA, 314 bp, Glycine max
  Clone ID: 701069922H2
gtgaaggacaaggcctccaaggagaacaaggcgccgctgatcgacgtcacgcagttcgggtactttaaggttctcggaaagggtgttttgccgcagaaccagcccgttgttgtcaaagctaagcttatttccaagatcgctgagaagaagatcaaggaggctggcggtgctgttgttctcaccgcctgattttattgacggtatcgctttttcaacgatttagggtttttctttgttttgttctgatacgtttcgttttggatgacgttgttgtttagtctatgctacatttcaggatttaatttaaggtttta

SEQ ID NO: 15298 - DNA, 148 bp, Glycine max
  Clone ID: 701069923H2
cggtttttgtgcttggcaaaagaaagagaagagaagatggtgtcaggttcggggatctgcgcgaagcgtcggaggtggacgcccggcaccacatgctgggtcggctcgcctcgattgtggcaaaggagctgctgaacggacaaaaagt

SEQ ID NO: 15299 - DNA, 150 bp, Glycine max
  Clone ID: 701069924H2
ctagcaagggcgttgtagtatagttagagatatcactactacaacaccctgcatagtttgttcagctataatactacttgagcttctttacctacttttcaaacctacattgcacacaaaatggaaaacaaaaagtcatgttatctactt

SEQ ID NO: 15300 - DNA, 306 bp, Glycine max
  Clone ID: 701069925H2
cgatgatgctgctagggctgttgaggctctcaatggcaaaaattttgatgacaaagaatggtatgttggaaaagctcagaagacatctgaaagggagaatgaattgaaacaacgatttgagcagagcatgacagaagctgctgataaatatcaaggcgcaaacttgtatgtaaaaactttagatgatagcattggtgatgaaaaacttaaggagctgttctccccttttggtaacattacctcttgcaaggttatgagagacccaaatggcttaagtcgtggatcgggtcttgttgcattctcgac

SEQ ID NO: 15301 - DNA, 109 bp, Glycine max
  Clone ID: 701069926H2
gcaacttttgcatttgaataaatggaggatttactttctatccggttaaagttgtgggatagcaaaattttattattttaattttgataaatttcaaaatattggctcc

SEQ ID NO: 15302 - DNA, 315 bp, Glycine max
  Clone ID: 701069927H2
caactcgcaaaccacaatgcctaagcagatccacgagattaaggattttcttctgacggcgcggaggaaggatgcgaggtcggtgaaaatcaagaggagcagggatgtcgttaagtttaaggttcgatgctccaagtacttgtacacgctttgtgtctttgaccctgagaaagccgataagttgaagcaatctcttcctcccggtttgagtgttcaagacctgtagagctgttgagtgtggcagcatgcgtttgtttctctttttgttacctgatgctctagattttgtggcttggttttatatgttggtgattt

SEQ ID NO: 15303 - DNA, 318 bp, Glycine max
  unsure at all n locations
  Clone ID: 701069928H2
attcctctctcattctcactataaacacaaaacccttcccatcctaattaaggtgaaaatgaaggcatcacccattgcttggttcactttggtggttgtgtttcttgtggctgaagttcaagtttcaatggcagtgacatgcagcccagtgcagctgagtgcatgtgtaagtgcaataacctcttcaacccctccatcaaacctatgctgctccaagatcanagaacagaaaccatgcctctgccaatacctcaagaaccccaatctcaagaagtttgttgactctcctaatgcaaggagagttgctagcacttgtgg

SEQ ID NO: 15304 - DNA, 312 bp, Glycine max
  Clone ID: 701069929H2
gtggaaagcggtaaagctagaactagaaattgcaatgaagaagaggagctgcagcagtagtagttcagtttttgaggaggcgaatggagtggatgctgaggccgaacctcaacaaccctcatcttgtgcagcagcagcacttgatgaattgcataaagagaaaaatgagaatggagaagaaaccctcgtgcctcgcaatccaatcttgacgatggcctctatgacatcgaaacaatacgccgtaagagtgtacgcaagggtcagctccagtacctaatcaaatggcgtggatggcctaagactgccaacact

SEQ ID NO: 15305 - DNA, 320 bp, Glycine max
  Clone ID: 701069930H2
cagactcagaggcggacaaggagaatgggaaggtcgagaagaaagtacaagcaatcgagaaccaaggtccgtgtgggactccctaagaagaaccctaggcttttcaaaccctctttctccgttccacccaagctcttgcgtgccctcgccgaagagccccaatgggacgaccaaggcaccgttaacagcaactactcctccttcggcgttctctccgaccctaactccctcaccgagccttctcccgatcctcaaaccttcgattccggcagcgatctcgaagaagacgacttgaaatcagccctaggaaagaagcgaag

SEQ ID NO: 15306 - DNA, 317 bp, Glycine max
  Clone ID: 701069931H2
caagttcaaagatgaagatgatccacgttcttttcctctttgctcttgtctcgttcacttcccatgcttctgtcaatgatttctgtgtagcagacctaaaaggtccagatagcccttcaggctatcagtgcaagccacctaacacagtcacagtggatgactttgtgttctctggctttgtagctggaaacaccacaaacactttcaatgctgcattaacctccgcatttgttactgattttccaggtgtgaatggtcttggtgtatctgtggcacggttagacatagccaaaggtggatcaatcccaatgcacaca

SEQ ID NO: 15307 - DNA, 247 bp, Glycine max
  Clone ID: 701069933H2
gaagaaccaaaaactaaccctcttttttttttcctacaattttaatataacaaatggatttcattccctccattttctccttcaaacgcagaacctctctctagccgtttccaaattcctccgtttcctcttttttctttttcttttcattttccactaaaaaaaataaataaaggaaagacaaagaacaaaagaagcgagatgaggtttttcttcgagttcgtgtcttgttgcggcctgccgacgc

SEQ ID NO: 15308 - DNA, 172 bp, Glycine max
  Clone ID: 701069934H2
gaatcggtcggcggctcgagggagggttgggtgactgtgcaggaggaggactgggtggtggtgcaggagactgagttgacgctggtgctggtgccggtgccggtggtggagctggagctggagctggtggtggatttccatgaaaacattaatattgttacactctccatat

SEQ ID NO: 15309 - DNA, 310 bp, Glycine max
  Clone ID: 701069941H2
aaagaaagaaaggagatgggagtggagaagcagttgttgaggtctggcaccggtccgaagccaattcccggtcagaacgtaaccgttcactgcactggtttcgggaagaacggtgacctttctcagaaattctggagcacaaaggatcctggccagaacccattcactttcaaaatcggccaaggttctgttatcaaaggatgggatgaaggtgcgcttggcatgcaaattggtgaagttgctcgtctccggtgctctccggattatgcttatggtgctggtggctttcctgcttggggaatacggccca

SEQ ID NO: 15310 - DNA, 282 bp, Glycine max
  unsure at all n locations
  Clone ID: 701069942H2
ctcccgaagaatccccaatacccatttcggtaaataatataatcgcaatccttcttcactcgcttcgctgccgacagggttactgaagagggcggcgcagaggctcccctcctcgccggggttcaagctggccctcctccgggcccacgcgtcggaggcccaggcccagcaggtggagcccaaggcccgcggcaccccgaccctcaaaaccttccaaatctaccgctggaccccggcgnacccctcaaagcccgagttcaaggactaccagatcaacctaaa

SEQ ID NO: 15311 - DNA, 311 bp, Glycine max
  Clone ID: 701069943H2
ttagctttgattctctgttctctgttttgttctgtttcgcgtattgtcttcatacaggaacttgaacaatgaagaatgcaaagggcaagggagcagcaagggcctcaaaagaatcactgaagcccgttgatgaccgaaaggttggaaagcggaaggcttccggtaagcctgggagaagtagtgcaccaaagaaggagaagaaggccaagaaagaccccaacaagcctaaaagaccacccagtgctttctttgtgttccttgaggagttcaggcagacctttaaggctgagaatcctaatgtgaaggctgta

SEQ ID NO: 15312 - DNA, 124 bp, Glycine max
  Clone ID: 701069944H2
gtaaaaaggaaaggggaaggcagcaaggcaaggcaggcgagtggatcgattcctcagcagcaccagacatttataaaagctctttcccttccctcaaatcgctcatactcttccaatctttttt

SEQ ID NO: 15313 - DNA, 290 bp, Glycine max
  Clone ID: 701069945H2
agagagagagggagtcagagaaaccctaggtaagaagaaaagatgccggctggtcatggtttgagatcccgcaccagagattccttctctcgtcctttcaggaagaagggaaccatcgccctcaccacatacctgagaacctaccacgtcggcgactatgttgacgtcaaggttaacggtgccgttcacaagggaatgccccacaaattctaccatggccgcaccggacgcgtctggaatgtcaccaaacgtgctgttggcgtcgaagtcaacaagcaggttggcaacag

SEQ ID NO: 15314 - DNA, 312 bp, Glycine max
  Clone ID: 701069946H2
acgaaaccctcttcatcttgttctatctgtgacgagcatcatggcctcaagagcagtgttattgttggctatgtgtgtgcttccggcgatggttgtggccattcgcccagcaaagaaccctttttgcgtgaagggtcgtgtctactgtgacccttgccgtgctggttttgagacctcagctaccacctacattgctggtgctgagattatgttgcaatgcaagagcagggttagcaacgaggctgtgtacacgaagaaggggtacaccgactcaaccggagcatacacaatgtacgtcgatgaggatcacgc

SEQ ID NO: 15315 - DNA, 308 bp, Glycine max
  Clone ID: 701069947H2
ctcttagtcccaattttctagggttttattcattttccgatggattctgcagatgttgagtaccgttgctttgtcggtgggctcgcttggggcactgacgaccatgccctcgagagagccttctctcagtacggcgaaatcgttgaaacgaagattatcaacgatcgtgagactggcagatccaggggttttggatttgtgaccttcgcctcggagcagtccatcaaagatgcgatcggagcgatgaatggccagaacttggcacggcgtaatatcactgtcaatgaagctcagtcccgcggtggcgg

SEQ ID NO: 15316 - DNA, 295 bp, Glycine max
  Clone ID: 701069948H2
ttacactgcatcttcttcaaattcctgtcttgaagatgacagctaagtggtatctcattgtgtgtgttgtagcgatctgggctcgtgatctgggttcatcatcacaccatgctcgttctccagcatcagcaccgtcagtggagtgttcaaacctggtattgaccttatcggattgcctcaccttcgttagcaacggcagcaccgtcaccaagccacagggaacatgctgctcttccttgaaaatgtgctcaaacagcccctaagtgccttgcgaggctttcaaagcagcgctcag

SEQ ID NO: 15317 - DNA, 269 bp, Glycine max
  Clone ID: 701069949H2
cagagtttgaactttgaacgttgaaggaacatagaggcagaggtttttcttctctcaccgtagaatcgaatcgagttcactttgatcgtgtgtgtctccgatcttcaaatccgcaacaaccatggtgaggggattgctcaacaagctcgtctctcgctccctctccgtcgccggaaaatggcagcacaaccaactccgccggctcaacatccacgagtaccagggcgctgaattgatgagcaaacacggagttaatgttccgaagagcg

SEQ ID NO: 15318 - DNA, 311 bp, Glycine max
  Clone ID: 701069950H2
gttcatcccctgaaggtctctctggaggatctttacctcggaacatctaagaacatctctctttcacgaaacgtgctgtgttcaaaatgcaatgggaagggctcaaagtctggggcttcaatgacctgtgctggttgccagggtactggcatgaaggtgtctattaggcacttggtccttctataattcagcagatgcagcatccttgcaatgagtgtaagggtactggagagacaatcaatgacagagacaggtgccaacagtgcaaaggagagacagtcgttcaggagagaagtacttgaagtgtgtgg

SEQ ID NO: 15319 - DNA, 300 bp, Glycine max
  Clone ID: 701069951H2
ctcaagcattgcatccctcttgatttgtagtttgttttgtgctttagataaaagttctgccaaatcaagaggggttttaagatcatagtgtgtgttttgcaacaatggctaagttctttgctgctatgatcttggcactctttgccatttctactattcaaacagtggtaatggctgctaatgaacaaggaggccacttgtatgacaacaagagcaaatatggaagtggaagtgtcaagagttaccaatgcgcatcaacatgctcgaggagatgtacccagacccataccacaagcctgc

SEQ ID NO: 15320 - DNA, 72 bp, Glycine max
  Clone ID: 701069953H2
tctttcttcaacgtttccatcatacacagatccgaatcctctctcaagccctaatttcccctcatttccatg

SEQ ID NO: 15321 - DNA, 306 bp, Glycine max
  Clone ID: 701069954H2
attggaggcaacatcactctcatcactggtttcttatactggattgcccaattgttgggttctatagtcgcatgcctcctcctcaatttgatcaccgctaagagcattccaagccactcgccggctaatggtgtgaacgatttgcaagctgtagtgtttgagcattgttatcacatttgggttggtttacactgtgtatgcaactgcagtagacccaaagaaggggtcattgggtatcattgcacccattgctattgggttcgttgtgggtgccacatcttagcagcaggccattcagcggcggtt

SEQ ID NO: 15322 - DNA, 307 bp, Glycine max
  Clone ID: 701069957H2
aactatgagcaaggattatctaatcatactttctctccttctttccacggtgcttgcaactgcaagttcttcttcttcttcttcctccctctatcttgggaagggcttctcccatcgcaaattgtctcccagttatcacattcacaaaaccattgacgaatcctatgcagttatcttcgatgctggtagcacgggaagccgtgtacatgtctatcgttttaaccaacaattagatctccttcgcattggccaagaccttgagttgtttgtcaagactatgccaggtttaagtgcttacgctgagaat

SEQ ID NO: 15323 - DNA, 307 bp, Glycine max
  Clone ID: 701069958H2
agcagaagatgctctccttcatgattggttccatgaagcccctcttcccaaatctgatttcaagccaatttttccttcttggcagtgataggacaggtactcttgctggatgcatgaaataccaagaacaatgctatttttactgtcattatttccaactttgtcttccttgttgatgatcatatacaaagaatgatatatgattgcaaggaacagggtaatggacttcattaggctcttgtttgttataaattagattagaagcagcaaattgatgtatagatctgagaaggtatgacattacccg

SEQ ID NO: 15324 - DNA, 300 bp, Glycine max
  Clone ID: 701069960H2
cgcttgcagccggaagactctgacgtctcccaacaatcccgcaccgtggctctctccgccaccgatctggtctccgacgacgaccgctccgtcgccgccgactcttggtccatcaagagcgagtacggaagcactctggacgacgaccagcgccatgctgacgccgccgaagctctctacaacgccaagctccgacatcactccgattacagttctgacacggatgaacctgattctggagcagtcacatccatgctgggacttcagagttattgggattctgcatatgctgacgagctc

SEQ ID NO: 15325 - DNA, 268 bp, Glycine max
  Clone ID: 701069962H2
tcatcctcaaaaaggctcagtcagaggaacccaagctttgggcttaagggatagcacttacgatgaagataaggtcaagaaagtacatgaatgatcatcaggaagctttacaaattacatggagtatgactttgattagtgctctcatacataaatatttttgttagagagcgtaatgatagtaaagttgagacttgagatattgtcccattatggtttgctcatgtgtataattgataatagacaaaaatcaacatttgaatatcta

SEQ ID NO: 15326 - DNA, 305 bp, Glycine max
  Clone ID: 701069963H2
gtttcgtttccaggtttcggcgcaatcggcttctgcttcaaggaatcagagcttgttattctctatcaacaagtaaaatgtcaggtgaagagggtgtcattgcagttgagccagctgctgctgctgctgccatcccaggcgagccaatggatatcatgactgccttacaacttgtgctcagaaaatctctggcttatggtggtttgtcgcgtggccttcatgaaggtgcaaaagtgattgagaagcatgctgcacaactctgtgttcttgcagaagactgtgaccagcctgactatgttaaactg

SEQ ID NO: 15327 - DNA, 262 bp, Glycine max
  unsure at all n locations
  Clone ID: 701069965H2
ctttcctcaaccttctttcttcttatatatcgaacatggctaagtatcattcaagtgggaaaagctcttccatgactgctatagccttcctgtttatccttctaatcacttatacaggcacaacagatgcacaatccggggtatgttatggaagacttggcaacaacttaccaacccctcaagaagttgtggccctctacaatcaagccaacattcgcangatgcgaatctacggtccaagcccagaagtcctcgaagcact

SEQ ID NO: 15328 - DNA, 225 bp, Glycine max
  Clone ID: 701069966H2
gcagaggaagaagaaggaggagatcttgagagatcaggtcgcaactgatcatggggagagaagttacaggaatgcaagttgtggacaagaagccaaatggcgtaataccagcttcaaatggtagttctaatgataaagtgtgcatttctcctaaaaggacagcagctaaggttcaggcgaaggatcacgaggtaaatgaatgtaccaaagctaactcttttgttg

SEQ ID NO: 15329 - DNA, 301 bp, Glycine max
  Clone ID: 701069967H2
ttaggttgcagtatctctacttcgagtacttttatttatcgcaagaccaaggacatttctcttaggcaacattccaaattctgcagtatacagaaatgtggaacaatatccaaatgcaaaccatattcctggaatcctaattcttgaaattgatgcacccatctactttgccaatgcaagctcatttaagagaaaggatcacaaggtggattgatgaagaggaagatagaatcaaagctacagggcaaaccagtttgccatatgtcataatggatatgactgctggtgctaacattgatac

SEQ ID NO: 15330 - DNA, 252 bp, Glycine max
  Clone ID: 701069970H2
atttctcacttcaactttgaacttcttttctctattattattatctttctctttttcttcatctcttatcttccttcacctttttattgaaagaaaaaaaaaatgagcaacataagcatggtagaggcaaagctgccaccaggattcaggtttcatccaagagatgaagagcttgtgtgtgattacttgatgaagaaggtgcaacacaatgattcccttctcttgatagatgttgaccttaacaagtgtgag

SEQ ID NO: 15331 - DNA, 296 bp, Glycine max
  Clone ID: 701069971H2
gactacgactacgattgtgtgtacactgcatacgttagaaccggttcggtgttgaagggcggaacggactctaagatcgggctgaagctgtacgacaagtacggctactacatctacattaaaaacctcgaagcatggggcggcttgatgggcaagggctacgactatttcgagcgcggcaacctcgacatcttcagcggaagggcgacctgtcttgacggacccgtctgtgccgttaacgttacttctgacggatcgggttctcaccacgctggtacttaatacgtccagtcact

SEQ ID NO: 15332 - DNA, 304 bp, Glycine max
  Clone ID: 701069972H2
atttaatatgaccaaaataattaataattcaaggacaaccttacattctgcaaacaaatgtgttcaccggaggcaagggtgatagagagcaaagaatctatctctggtttgatcccacgaaagaataccacagatactccattctctggaacttgtatcagattgtgttctttgtggacgaggtgccaatcagggtgttcaagaacagcaaggacttgggagtgaaattcccattcgaccagccatgtttagtgccaacagtttgtggaacgctgatgactgggcaacgaggggtggtttggag

SEQ ID NO: 15333 - DNA, 305 bp, Glycine max
  Clone ID: 701069973H2
gggaaggacccaagggagaagacaaatactgtgcagaatccttggaaaccctaatgaactttgtcatttcaaagcttggaaagaacgttcaggcattttcaagctccttcttgagtaagcaagaggaatacacagtggagggagtgcataatcttggaggcaaagcagtgatgtgtcataggttgaatttccaaaaggctgtgttttactgccatgaagtcatgacacaacagctttcatggttccattgcttgccggtgatggaaccaaaactcaggcacttgctgtttgccactttgatactt

SEQ ID NO: 15334 - DNA, 306 bp, Glycine max
  unsure at all n locations
  Clone ID: 701069974H2
caacactataggcgaaggactttaggttgggatttgggaattagggttattcgcgtggcgaagatgattgaggtggttttgaacgatcgattggggaagaaggtgcgcgtgaagtgcaacgagcgatgataccatcggcgacctgaagaagcttgtggcggctcagactggcacaagagccgacaagatccgcatccagaagtggtacaccatctacaaggatcacatcactctcaaggattacgagatccatgacggcatgggtctcgaactctactacaactanacacaacaaggtgtgttttt

SEQ ID NO: 15335 - DNA, 291 bp, Glycine max
  Clone ID: 701069975H2
tgcgtggttggttttgcggtatcgaagaagaagaccgggaaacaggttgtgccggtgaaatcagtgatctacgcgctttcccctttccagcaaaagattatgccgggtctctggaaggacttgcccacgaagattcaccacaaggtctccgagaattggatcagcgccactcttttgctcggtcccctcgtcggcacctacgcgtatgttcagaactacctggacaaggagaagctggctcacaggtactgagctcttgcaagagctgattggataccttctagtttgttg

SEQ ID NO: 15336 - DNA, 300 bp, Glycine max
  Clone ID: 701069976H2
gaaccatcttcagcttcaagttcttaacaaagcgccccacgttctgagacaaacccagtatgctgtctgccatggaggatgagaaagtttcgatttttcattgattgggtataactgcacaaagaggttagtgaagcaatgcatagagcgatcgtgtttctcattcacccacgattcctcctcctcttccttgtcctctcaattttcctcattttcacattttctggttctactactaccagtggttttgctacacctcaacaggttgttgagatcattgaggagaaaccagaagaggag

SEQ ID NO: 15337 - DNA, 306 bp, Glycine max
  unsure at all n locations
  Clone ID: 701069977H2
ctctgcttcttgatgggggtacgctgaactactttgggaaacccatccccatcaatcttattgtggctgtcattgctgagattgttcttgtgggaggtgcagagtactacagaattattaatggcctgaacttcgaagacaaacttcatccaggtggtccatttgacccattggggcttgcacatgatccagaccaagctgcactgctanaggtgaaggaaattaagaatggcagacttgctatgtttgccatgcttggtttctacttccaagcatatgtcaccggagaaggtcctgttgagaact

SEQ ID NO: 15338 - DNA, 307 bp, Glycine max
  Clone ID: 701069978H2
ctctgatctcctcatcaggacatgccacaggcgcggtgtgcatgccatgggaggaatggcagcacagattccaatcaaagatgacccagttgcaaatgaggcagcactggaacttgtaaggaaggaccagcttagagaagtgaaggcaggccacgatggaacttgggctgcacatcctggtctcattccatcctgcatggaggttttcaacaacaacatgggcaatgctcccaaccagatagacacagtgaaacgcgatgatgctgcaaacttaactgaacaagcctcttgcagataccaacaggaa

SEQ ID NO: 15339 - DNA, 303 bp, Glycine max
  Clone ID: 701069979H2
ctgcagacagcttggatccttgtcaagcgcagtgctgaatataaacctttgcagtttttagcctttgcctttgtttataggctttttgagaagttaaaaacctttgaatctcctgtaacccccaaatataatgtgagtttcatcttttatgacagcaaatttggtgaaattttaaaatcttctgtttttgaaccatgttgagtttttagtagaattgtatagttcatgttactgttggctacaggaagagggtgaagacacaggcgaaggactccgcatgggaaaacgattgcttcgatcact

SEQ ID NO: 15340 - DNA, 299 bp, Glycine max
  Clone ID: 701069980H2
cagatatttgcgcgatgtatggtgatgatatctgaatgcaagccgtgggggtgacgaagatattaataaaacatagagttgtggctagaggattttgaaagggccttatttgtgccacctttcattagtgccctcaaaattgagggggggcgcttgttgccatcacgacgacatttcctacgattctttttcactatattttctaaaggattctttttggttcgtgtaatttattatatactgtttatacctagactatgaactattttacttcagttttctttttgtaatgtatgatg

SEQ ID NO: 15341 - DNA, 205 bp, Glycine max
  Clone ID: 701069981H2
cgccaacagcaagccccacgctccctcctccgacccacgctgggccgccatccaccggatccgatcggagtcccccagccgccgcatcctcccctccgacctccgcttctcacgccgtctcggctccggcgacatcagctccgtctacctcgccgaactcaacgacgggtccctctccgtgatgttcgccgccaggtgatggaca

SEQ ID NO: 15342 - DNA, 292 bp, Glycine max
  Clone ID: 701069982H2
aagaagaagaagaagaagaagaaaaagagaagaagtagtttggtgtgttaattgttcgagagagaaatggacgactacacgagggaaatgatggacctgaagacactggtcactcgcactctcgagaagaaaggcgtccttgccaggatccgtgccgaactcagagcgagtgtgttcgaggccatcgaagaggaagatcatgtgattgagcaggaacaagccctacctcctgcattgcttggtagctgcaacgatcgagctaaacagttcacgcttctcctccaggagattc

SEQ ID NO: 15343 - DNA, 239 bp, Glycine max
  Clone ID: 701069983H2
gtttgttgtgagctataagctagtttatcgtgaggagaatatgaagttgtttgtactctttgttgctgcagtagttttcgtagcatggccatgccatggcgcaggctaccaaaggttccctctccgaatgacaactggctatggtgagcgttcttcggaggtaaaatgcgcaagtcttaggcttgctgtggaagcacacaacatccgagcctctaaaaccattcctgaagagtgcgttg

SEQ ID NO: 15344 - DNA, 303 bp, Glycine max
  Clone ID: 701069984H2
ttagcaaccaagcaagagaatggcgacgacagcagccttgtgcggcactatgatgagcagctccttcctgaggagaaaagcagtggtcacaagcctgaaggcattccccaatgctaacgcagtgtttggtgtaaagggtggacgtggaggtggtgtgactgccatggctagcttcaaggtgaagctgataaccccagagggagagaaagaatttgaatgcccagatgatgtatacattcttgaccaggcagaggaggaagggcttgagcttcctactcatgcagggctggtctgctctgtgtg

SEQ ID NO: 15345 - DNA, 172 bp, Glycine max
  Clone ID: 701069986H2
gtgtgattttgtttgcatagattgttttgtgagattttatagttatatatttcgtgagtccttttattttaggtttgcttagtctgagcccaataatgtggtggataaaaatgcgcttctaattcatgttatttgtcattttttcaccaagaaatgaattttatttaccaaa

SEQ ID NO: 15346 - DNA, 297 bp, Glycine max
  Clone ID: 701069987H2
gaaacagtgtgatgaaaatgaaggtccttgttttcttcgttgctacaattttcgtagcatggcaatgccatgcgtacgatatgttccctctccgaatgaacactggctatggtgcccgtactccggaggtgaaatgcgcaagttggaggcttgctgtcgaagcacacaacatctttggctttgagaccattcctgaagagcgcgttgaagcaacaaaggaatacatccatggcgaacaatatagatcagactccaaaacagttaaccaacaagcttacttttatgccagagacctcg

SEQ ID NO: 15347 - DNA, 293 bp, Glycine max
  Clone ID: 701069988H2
cgactataagctagtttatcgtgaggagaatatgaagttgtttgtactctttgttgctgcagtagttttcgtagcatggccatgccatggcgcaggctaccaaaggttccctctcccaatgaaaactggctatggtgagcgttcttcggaggtaaaatgcgcaagtcttaggcttgctgtggaagcacaccacatccgagcccctaaaaccattcctgaagagtgcgacgcaccgacaaaggactacattaatggcgaacaatttagatcagactctagaacggttaaccaac

SEQ ID NO: 15348 - DNA, 302 bp, Glycine max
  Clone ID: 701069989H2
ggcagcttcattcaccaggtgttttggcaattggaagtagtatgaaaggagaaaattcatattcacatcatttggattcagatgttggcgtttcagttgttgatcgttttacattttacactcttgctttctttgagaggctgaatatgtatgacaatgcttcgttgagcagccttttcaattcatataatccaaatttgttgatgtcgactgcatattacagaatggatatataccaacgctatttaaaggaggtacctgtgacaaacttctttggttctgtaatgaaaacgatacatact

SEQ ID NO: 15349 - DNA, 282 bp, Glycine max
  Clone ID: 701069990H2
ctgattttgatgttcgaaatccttgtagataaactcagagggagtgcccaggaatttctaccctggcgaccaacttccattatggcacgaggaaatggagccccacaactccttgctagacattcttggtgccccagagccgatgagcatgtgatgtgaagaagttgccgtgtttcagaaatgtttcctgatagattatatcttgtcttctctcttttatgaactagctaacgatttgtgtagtcaattactttgtttggttggatatttttgatggttgag

SEQ ID NO: 15350 - DNA, 304 bp, Glycine max
  Clone ID: 701069991H2
catcttttgatttgataacaacaacctcgttgtggttttccaatgctgcgaagtcgaagatctagctagaggcagagaacgttctccctaatcttctgccgatggcgatcttctacgctttggtggccagaggcaccgtcgtcctggcggagttcagcgccgtcaccggcaacaccggcgccgtctcccgccgcatcctcgagaagcttccggcggagtccgactccaggctctgcttctctcaggatcgctacatcttccacatactccgatcggatggcatcacctacgtctgtatggccaa

SEQ ID NO: 15351 - DNA, 303 bp, Glycine max
  unsure at all n locations
  Clone ID: 701069992H2
gtgatttcagtgagtgatcggtgttcacttgatctcatcataatcgtcagcgtcaattgaagaagatgccgatcagaaacatcgccgtcggaaggcctgaagaggcgactcaccccgacacgttgaaggcggctttggctgagttcatctccggcatcgcctacaacaagctcaccgacaacggcgctgccacccctgccggcctcatctccgcctccatcgcccatgcattcgccctcttcgtcgccgtctccgtcggcgccaacatctccggcggncacgtcaaccccgccgtcaccttcg

SEQ ID NO: 15352 - DNA, 261 bp, Glycine max
  Clone ID: 701069993H2
tcgcagatcagagcgagcattcgaaaacggcgtcgcctccggaggaccatgaccgtcccgttcgagtgtacgcggatggcatctacgatctcttccactttggccacgctcgctccctcgagcaagccaggacatcgtttccgaatacatagttgcttgttgggtgttgcaacgatgaagtctaccacatatacaaaggcgaaactgttatgccagacgtcgaacgatacgaatccctgcgcaactgcaaatgggtggatg

SEQ ID NO: 15353 - DNA, 308 bp, Glycine max
  Clone ID: 701069994H2
gagggatttggaactttggatatctatagcgaaagcgctgacaccaccaaaaaccgaactgttcccagatctctctctcactcttccaacaatcgaaatccaaaaccctaccgacaccacactcaatcgaaattcttcattctcttctcatcgatggggcagaagtctctgatctacgcgttcgtgtcgcggggaacagtgattctcgcggagtacaccgaattcagcggaaacttcaactccatcgccttccagtgccttcagaagctccctgccaccaacaacaagttcacctacaattgcgacgc

SEQ ID NO: 15354 - DNA, 298 bp, Glycine max
  Clone ID: 701069995H2
ctcatttttaaaaagttgcagttccacctggagaattgcatacgtggatataggaaggatacaagattactgcttccgtaacactattagatatcctaaacttaaagatgtggtagagctgttggatattctgattattccaggttctgacaatggcacttcgatacccaaaatatttgaaggcggcgtcctaattaaaaatggtattgaagtgttcaagcagacatatgtgatgctgttcttttcgagccttgacaacattggagatgagatatctcttttgaattccatcaacaac

SEQ ID NO: 15355 - DNA, 307 bp, Glycine max
  Clone ID: 701069996H2
gtgaaaatggcggtaccttgctctccaagaggatcgtgaagaagcgcgtcaagaagtttatacgcccccagagtgatcgcaagatctccgtcaagccaagctggcgcagacccaagggtattgattctcgtgtcaggagaaagttcaaaggatgcactttgatgcccaacattggttatggctcagacaagaaaacccgccattatctaccaaatggtttcaagaaatttgtcgtgcacaatgtgaaagacctggaacttctcatgatgcataacaggacatactgtgctgagattgctcacaatgt

SEQ ID NO: 15356 - DNA, 254 bp, Glycine max
  Clone ID: 701070001H2
cgcgatcactgcgttttaaactatttattctgaatctaacaacaaacatccctcaggcaacaatcatcactattaataagagttccttccttcactctcacccaagccaaagaaaggaacaagaacaagaacaacaaagtaacgtgaaagagagagagatggaggcgattgttccagtggtggatttccagaggctttcagaggaagaggagcgcaagaagctgagaaaaacatgtgagacaccagggtgtttc

SEQ ID NO: 15357 - DNA, 269 bp, Glycine max
  Clone ID: 701070002H2
atctaattcaatatacaacactgaaactttcaaagctcttttgagaacttgttattgcaatggctgacatagatcgctcctttgataataatgtttctgccgtatctactgagacatcaagccaagtttcagatgttgaattttctgaagctgaggaaaatccttattgccatggtgtataatctggttggggagaggtggtctttgattgctggaagacttcctggaagaactgcagaagagatagagacatattggacttcaagatt

SEQ ID NO: 15358 - DNA, 272 bp, Glycine max
  Clone ID: 701070008H2
cctaaataagcatcttaattcatagtctcttggtccttccttccttcttctgctcaataagtgtgtgccactctaattaattaccacccccttctagacatagttcttctccctctgttctctattctctacactgtgaaaccaagatgaaggtagcatttgcagctgttctacttatatgccttgtcctcagctcctccttgttcgaggtgtcaatggctggttctgctttctgttcctccaagtgctcgaagatgtgttctagagctgga

SEQ ID NO: 15359 - DNA, 273 bp, Glycine max
  Clone ID: 701070009H2
cgttcacattttgaacttgtttgtctgtctccaatggagcaagggagcacagacactcgtgtggatgcaaacccaagtctttccagtcacgaagaaatacaatctttggatttcgatactgagtgtgagaccaaaatgaccaactctgctggaaatggggcaggaggttcttcctatgttgaagaaggcgtgagaaaaaagcgcggcagaaaaagtaaaaaggagatgggaaagatgttagatgctaccgccatggaaggtggggtttccagc

SEQ ID NO: 15360 - DNA, 263 bp, Glycine max
  unsure at all n locations
  Clone ID: 701070010H2
ctttaagatctgattgggcggcgacgatngagaacaacgacagtatcatatcgcgggagaagatcgaccaggcggccgtgtggctcggctccgccgtctcttccgctttcttttcctctttggaacgcttttcctgcgtcaacgtcgccacctctgaccccgacaacgacgaagacgacgacgattattactccaccaccaccgccactcccaccgccgcatccaccaccaccactagccctccctccattcagatcgacggg

SEQ ID NO: 15361 - DNA, 270 bp, Glycine max
  Clone ID: 701070011H2
cccctaactacgcacgcattcgtgagacactcaatattcgtcgctcatggcactctcttctcgtctctcttccaaatccaaattgatctatggcagtcaaatacttctacaaaaggagcatgctattccagttcgtcactttgctaaagagtctgcccctcctgcccttaagggagacgagatgctgaagaacatttttgtggaggtgaagaacaaatttgagaccgccataggaatattaaagaaggagaaaatcaccattgacccaaa

SEQ ID NO: 15362 - DNA, 268 bp, Glycine max
  Clone ID: 701070012H2
aacgatactacattgcactttcagatatttgttcgttactctctctctctctgcgacaccccaatttccaaaaacacaaacaagtggcctcattctgaactctgaaactcaaccttctttcttctcttctctctcgtgtttaactgttcagggcatcctagtttctctcagttagccaaaatggtagctgcaaatgagagggtcgtcgctgtgatcatggttggaggacccactaaaggtactagattccgaccattgtcattcaagt

SEQ ID NO: 15363 - DNA, 266 bp, Glycine max
  Clone ID: 701070014H2
cactcttgttcttcggtctcctcctattctccgctgccgtagccaccgtcgaacgaagctacgattacgacaaccttctgatccgtcaagtggtgccggacgcggaggaccaccacctgctcaactcggagaccacttctccgccttcaagacaaagttcgccaagacctacgtcacgcaggatgagcacgaccaccgcttccgtatcttcaagaacaacttgctccgcgccaagtcgcaccatatattggacccctccgtcgtcc

SEQ ID NO: 15364 - DNA, 269 bp, Glycine max
  Clone ID: 701070015H2
cgagcacacacaaacccgtccctcacactctccaaaccctagcggcactacacactagttctatcgctatctccccaagatgtcgagcgccgatcccgagcacagagaagaggaggaggcacccgccgttggcgacgacgaggacaccggagctcacgtcgctccaatcgtcaagctcgaggaggttgctgtcaccaccggcgaggaggacgaagatgcaatcctggatctcaaatcgaagctttaccggttcgacaaggacgggaaca

SEQ ID NO: 15365 - DNA, 272 bp, Glycine max
  Clone ID: 701070016H2
ctctcagtgagagaaactctctctctagaaaccctattgcacgttttgcaatcgaactcgacaatggccaacagcaacctccctcgaagaatcatcaaggaaacgcagcgtttgctcagtgagccagcaccaggaattagtgcctccccttctgaagagaatatgcgatatttcaatgtgatgatccttgggccaacccagtcgccttatgaaggaggagttttcaagttagaactatttttgccagaagaatatccaatggctgctccaag

SEQ ID NO: 15366 - DNA, 272 bp, Glycine max
  Clone ID: 701070018H2
tctcgctactaagagttgctgcttcttcagccactccgcacctcgcagcctctgtgccctcaacaaccatggctgaaatcgaaactaccgttctagatcccacccaaatcgacgtcaaactcttcaatcgctggagcttcgaggatgttgaggttaatgatatgtctctggctgattacattggagtgtccccatcaaagcatgctacatatgttcctcacactgctggtaggtactcagtgaagaggttcaggaaagcgcagtgccccatg

SEQ ID NO: 15367 - DNA, 269 bp, Glycine max
  Clone ID: 701070020H2
ctcttttgcacacccaaccgttcactaatctcactctgttccgtccaagaagaaaatggcggtgatggcggttcatcaattcgcgcaatgcatcacttgccacgcttggagccctgaccaatccatggttgctttatgcccaaacaataatgaagtgcacatctataggttggttgaagacaaatgggaaaaggtgtatgttcttcaaaagcatgaccaggtaatttctgggatagactggagtgcaagatcaaatagaatagttacgc

SEQ ID NO: 15368 - DNA, 268 bp, Glycine max
  Clone ID: 701070021H2
caccactcggaaatttctctgcgtctccctatttttttctgaatctaacattaacaacaagaatggcatccaacaggggtcaaggtggaattcagcagctgttggctgctgaacaagaggcacaacggattgtgaatgctgcgaaaaatgaaaaattggctaggttgaagcaagccaaggaagaggctgaaaaggagattgctcaataccgagctcaactagaggctgagtctcaaaagacagtgtcagacagtactggagattctgg

SEQ ID NO: 15369 - DNA, 268 bp, Glycine max
  Clone ID: 701070022H2
ctttcattttccctcactttctcgctcgccaaacgcccctctctctcctccaatggccgaccagctcaccgacgaccagatcgccgagttcaaggaggccttcagcctcttcgacaaggacggcgatggttgtattactactaaggaacttgggactgtgatgcggtcactagggcaaaacccaactgaggcagaactgcaggatatgattaatgaggttgatgctgatggcaatggaaccatcgacttcccagagttcctcaacctg

SEQ ID NO: 15370 - DNA, 266 bp, Glycine max
  Clone ID: 701070023H2
cagcagcagagcttgtatacgtcgccgttcagcgtagaacatgatcattcccgagaagaatcgtaaagagatctgcaaatacctcttccaagagggagtttgctttgcgaagaaggacttcaatctggcgaagacccggagattgatgtgccgaatctgcaggtgataaagctgatgcagagcttcaaatccagagagtacgtgagggaaacatttgcgtggatgcactattactggttcctcaccaacgatggaattgagttcct

SEQ ID NO: 15371 - DNA, 261 bp, Glycine max
  Clone ID: 701070024H2
cagctgtctgctgttagatctgtactccctagccatttatttggaaaattccaatttcaaggattgagtactcttcagagtgatgctctaagagtagctatctcaggaatcattgctgattccaaggataagaacaggaaatttgtggagaccattgaactccaaattgggttgaaaaattatgatccccataaggacaagcgtttcagtggctctgtcaagttccctcatattcctcgccccaagatgaagatttgtatg

SEQ ID NO: 15372 - DNA, 269 bp, Glycine max
  Clone ID: 701070025H2
cgtttgctacctaaaccctagtctccatacatcaacttgggaggttaaagagacggcaacgttgtgctgtccgccttgaccgagccagagcttcgtcttggccctcgattttgccctgtaaaactaatcccagtcacaacagaaataatcaatggcaccgaaacagaccaaggctgagaagaagatcgcttacgatgcgaactgtgcgacctaatggaggagtacggccaaatcctcgttgtaaactccgacaacgtgggatcgaacag

SEQ ID NO: 15373 - DNA, 268 bp, Glycine max
  unsure at all n locations
  Clone ID: 701070026H2
ggcgaacacgcatacgatgttaatttgaatgggacagtgacttcggtattcctggtgcattttatattaagaacttcatgcaaaatgagttctacctcaagtctctaattctcgaagacattccataccacggaaccatacaacntcgtatgccactcctgggtttacaattcaaaaaactacaagactcttcgtcatttctttgccaacaatacatatcttccaagcgagacatcagcctcacttgtgaagtacagagaagaagaat

SEQ ID NO: 15374 - DNA, 147 bp, Glycine max
  Clone ID: 701070027H2
atctacaacgcctcgaatccacacagttctactctacgctctaaaccctctctctctctctctcgatatatcatggttttgaccaatcagcaaaccgtggattaccctagtttcaaactcgtcatcgtcggtgacggcggtacaaga

SEQ ID NO: 15375 - DNA, 264 bp, Glycine max
  Clone ID: 701070028H2
gtctctccgcagcagccacacttctgcgccgtttcagctgaagagccatccgcaggtaagcaatggttaagcataataatgttatccccaatgggcacttccggaaacactggcaaaactatgtgaagacttggtttaatcaaccagcccgaaagaccagaagacggttggctcggcagaagaaggctgtcaagattttccccaggcctactgctggatctctcaggcctattgttcatggccagactctgaaatacaacatga

SEQ ID NO: 15376 - DNA, 263 bp, Glycine max
  Clone ID: 701070030H2
gctagctattagttcgattttgtagtaagtgaggtgccaatatggtgaagatagctcttggtactttggatgactcttttagcgctgcctctcttaaggcttatttcgcagagttccacgcaactctgatttccgtgttcgctggtgttggatcagccatcgcttacaacgagcttacaaaagatgcagccttggatccaacggggctggtggcagtagctgtggcacatgcatttgcactgtttgtaggtgtctccgtcgcc

SEQ ID NO: 15377 - DNA, 266 bp, Glycine max
  Clone ID: 701070032H2
cattttggcacccttgccaattgggtcgctgtgttcttggttcacttggcaaccatccccatcaccggaactggtatcaaccctgctcgtagtcttggtgctgctatcatcttcaacaaggaccttggttgggatgaacactggatcttctgggtgggaccattcatcggtgcagctcttgcagcactctaccaccaggtcgtaatcagggccattcccttcaagtccaagtgattcaatcaaacggttcatgcttaatcaagttg

SEQ ID NO: 15378 - DNA, 270 bp, Glycine max
  Clone ID: 701070033H2
cggctcgaggtggtgttagatctgtacccgcctagccattgatttggaaaagtccaagcttcaaagatgagtaagcttcagagtgatgctcttagagaagctatctcaggaatcatgactgattccaaggaaaagaacaggaaatttgtggagaccattgaactccaaattgggctgaaaaactatgatccccagaaggacaagcgttttagtggctctgttaagttgcctcacattcctcgccccaagatgaagatttgtatgcttggg

SEQ ID NO: 15379 - DNA, 268 bp, Glycine max
  Clone ID: 701070034H2
caaaccaaacacaacacaaggagagaaccagatctctctttctcaaatcaccaagaatagttgaaaatggggctgtctttcacgaagctgttcagccggctctttgcgaagaaggagatgcgtattcttatggtgggtctcgacgccgccggtaagaccaccattctctacaaactcaagctaggagagatcgtcacaaccattcccaccattgggtttaatgttgaaactgtggaatacaagaacatcagcttcactgtctgggtgt

SEQ ID NO: 15380 - DNA, 268 bp, Glycine max
  Clone ID: 701070036H2
caagctcatcctagagttttaaaattggcagcagcctcctccatggctctctcttccccatccttggctggtcaggccgtgaagctgggcccatcagcccccgaagtcgggagggtcagcatgaggaagaccgtcaccaagcaggcctcctccggaagcccatggtacggcccagaccgcgtcaagtacttgggcccattctctggcgagcccccgtcctacctcactggcgagttcccaggtgactacggctgggacactgctggct

SEQ ID NO: 15381 - DNA, 147 bp, Glycine max
  Clone ID: 701070037H2
ctcttggaagaattgtctttcccttgcggacattcactctcattcttcttgaaaatttaagatgagtatggatagcttagtattaatgtaatatgaaaggttcggtgtgaaacatcttatttttgaatgtgttaacttttctagcta

SEQ ID NO: 15382 - DNA, 266 bp, Glycine max
  Clone ID: 701070039H2
caacaagctttcttttatgctagtgaacgcgaagtccatcacaacgacatatttatattcggcatagataacaccgtactctctaatatcccatactatgaaaaacatggatatggggtggaggaatttaatgaaaccttatatgatgaatgggttaacaagggcgacgcaccggcattgccagagactcttaaaaattacaacaagctgttgtctcttggcttcaagattgtattcttgtcaggaagatatcttgacaaaatggc

SEQ ID NO: 15383 - DNA, 264 bp, Glycine max
  Clone ID: 701070040H2
ccctcctgggagggatagcaccactcgtcttggccagaccctccctagcagaagaatttgagaaagcagcactcaccgacttcaacctcaccctgcccataataatggtggagtttctgctgctgatggttgccttggacaagatatggttcaccccacttgggaaattcatggacgagagggacgcggcgatcagggagaagctgagcagcgtgaaggacacgtcggaggacgtgaagcatgctggaggacaaggccaatgct

SEQ ID NO: 15384 - DNA, 266 bp, Glycine max
  Clone ID: 701070041H2
cgcaaagagcttggggattgaattactcctttggaagtgagcctcaaggagactgtggatagcttgaaagaaaagaagtttaccaacttttaatttgtgatatctcctagaggagaaaacgttaataatagaaaccttgtgtggttggtcacttggcttgtgatgctcatgcttctgaacaaacttactattaaataagacttaaatcaagattggtataagtactgaaagaaaccattcttggtctgatttgtaccggtgacatt

SEQ ID NO: 15385 - DNA, 266 bp, Glycine max
  Clone ID: 701070042H2
caacaattgacatctcacactgcattccttcttctcccagaatcggtcactaaatccgcaatcatgaagctcgataccaccggtctcgaatcgtttcccacactgcttgcgccccaaaacgacgtcgttggagaactctccgccgctccatccttcgaccttccgaattccaacgattttgatgggtttgtgaaagaagctattcagatggtgaagcccgcgaagggtactacgactcttgcttttatatttaaggagggtgtttg

SEQ ID NO: 15386 - DNA, 261 bp, Glycine max
  Clone ID: 701070043H2
ccaaaaacaactttgccgctgcgtgctgctaatagcgcgttgcatctgctacctatcatacatattttctccaaaccgccgattccgttgagcgtttctaccgtagcgctcagccgtgacaatctgtgcaagaactgcaagacacctggtcattatgcaagacaatgccctaatgtcgcaattcgccacaactgtggcctccctgggcatattgcttctgaatgtacgacaaagtcactgtgctggaactgtaacgaacct

SEQ ID NO: 15387 - DNA, 263 bp, Glycine max
  unsure at all n locations
  Clone ID: 701070044H2
cacaaacggaaactaaactacgtttttattttttccagacaataatacttagatantgagtgtgatcgatggcatacccaaacccttatccggctcagccctatccctccgcctccgcgccgatgccggcggttccctccgccgtgatcggcccccagttctgcgcgccgtacccggtggatctggcggtggtgaagaaggtgatgaccatctctgacaacttcgttgtcaccgacgtcaacggcaacatcgtattcaaagta

SEQ ID NO: 15388 - DNA, 264 bp, Glycine max
  Clone ID: 701070045H2
ctgacagtgttggcagacttcatgggggccatcggttcaggaaccggaatattgcttgcagtaacaatcatctatcagtactttgagacatttgagaaggagagagctagtgagcttggcttcttcggtttctaagttctgccaagcaaataatgttggttggtgactccaacgagctctcccacaccccttgtttgagggatcgttatacttgtaggtcgtttaacatcgtaagggaggacataactagtttgttgtcaaatt

SEQ ID NO: 15389 - DNA, 144 bp, Glycine max
  Clone ID: 701070047H2
cgtaaggtaggttaacactcttcttcatcgtcgtcgcaatgggacgtgtgatccgtgcgcacgtataggcatcaggctcggtcttcaagtcccatacgcaccaccgcaatggccctgcatgcttccggagcctggacttcgggg

SEQ ID NO: 15390 - DNA, 261 bp, Glycine max
  Clone ID: 701070048H2
cttgatttctccctcttcgctcttctcagtgaccagagacagatcatgctggagatggcgaacgattacgctgtcgttgcggcactcgcggcgttggtgctactcgcggcgagtgtggcggtggatgctcaggagaactcggacgtgaagacgctggtgaagtacaagcacgggaagaagtactgcgacaaaggatgggaatgtaagggctggtcaatttactgttgtaacctcaccattaccgattatctccagacctac

SEQ ID NO: 15391 - DNA, 268 bp, Glycine max
  Clone ID: 701070049H2
caagccgttcacacacccctctctcttcttcaaaacgcaccctattcctccccctattttgcatcgcatttgttcttgaatctctttggtattcctcactcagagcctctcatcagagagagagaaagtgagagatggagagaatgttccctcccaagatgccctctactatgaattcccatgacagacccatgtgtgttcaaggagactcgggtcttgtcctcaccactgaccctaaacctcgcctccgttggactgttgagctcat

SEQ ID NO: 15392 - DNA, 266 bp, Glycine max
  Clone ID: 701070051H2
cttgtgagacagagagtactagtgtgataaatcaagagagagagacagaatatggtttccagggttcacaagagaacagccatgtacaggaacctacacctgcttcgttcaatcagatactcacactcggtgtcagattacatacaaggtttaaagcaaaaactggaagaattgaaccagttaacagtggcaacggcacgaaaaatcgttgactatgatccaatgcctaagcttgaagttgaaacacaagaagagggttttgtgtc

SEQ ID NO: 15393 - DNA, 262 bp, Glycine max
  Clone ID: 701070052H2
caacgtgcgaaagaagtgcataatctggttcttctgggtagggcttctgttgtgatagagtcttacagagaagagtgtgtgtgtgtgataattgggataagctctaatcaatcaatttcaatggcatcatccaattcgactcagcaagaagggaacaaacccgcaaagagaaaacccgtgttcaccaaagtggatcagctcaaacctggaaccaacggtcacacgttggtggctaaggtcttgtcctccgacaccgtcgtac

SEQ ID NO: 15394 - DNA, 265 bp, Glycine max
  Clone ID: 701070053H2
agcaacatttgaaaatgttgaagatggctgaaagaattgcggaaccacaacaatgttggcatctgtgtgggtaataaatcagaccttcgtcaccttgtagccgtgtcaactgaagatgggaagtcctatgctgagaaggaatcactttacttcatggaaacctcagctctggaggctactaatgtagagaatgcctttgccgaagttctgactcaaatctatcacattgttagcaagaaagcagtagaggtggctgaaaatgaac

SEQ ID NO: 15395 - DNA, 252 bp, Glycine max
  Clone ID: 701070054H2
aaagcatataatgttgttctgagcatgtgaaagccaactgaggagttgctgcagcatgcctagatttgtgggttttagtttgaagttattgtatgagtctatttttgcctctatcatagggatattgatggtttagtacaattatacccgttctcattgttgctgagtgaatgcttttttaattactattggttttctgtgtttttaagactgacctgttgagttattaattgcttacacttcatgatagtg

SEQ ID NO: 15396 - DNA, 265 bp, Glycine max
  Clone ID: 701070055H2
cctcgttcgtatcgaagaagagaagatggggaaacagattgtgaccgtgaaatcagtgatctacgcgctctcccctatccagcagaagataatgccgggtctctggaaggacttgcccacaaagattcaccacaaggtctccgagaattggatcagcgccactctcttgcttggtcccctcgtcggaacctacacgtatgttcagaactacctggaaaaggagaagctgtctcacaggtactgaactcatgcaagagctgatggt

SEQ ID NO: 15397 - DNA, 265 bp, Glycine max
  Clone ID: 701070056H2
cagagggagtagcggcattaaaatgcagatcttcgtgaaaactctgacagggaagactataaccctcgaggtcgagagcagcgacaccatcgacaatgtcaaggccaagattcaagacaaggaaggcattcctccggatcagcagcgtttgattttcgccggaaagcagcttgaagatggaaggaccctggccgattacaacatccagaaggaatcaacccttcatctcgtcctcaggcttcgtggtggcatcattgagccttcc

SEQ ID NO: 15398 - DNA, 265 bp, Glycine max
  Clone ID: 701070057H2
ctgcctgtaagactgaaaaaccttctcttttccttctctcaagtctcaagagatttcatcatggctccaaagaaggacaaggctccaccaccttcctccaagcccgccaaatctggcggtggcaagcagaagaagaagaagtggagcaagggaaagcaaaaggagaaggtgaacaacatggtgctgtttgatcagggcacctatgataagctcctttctgaagctcccaaattcaagctcatcactccttccattctttctgtcg

SEQ ID NO: 15399 - DNA, 254 bp, Glycine max
  Clone ID: 701070058H2
cacagtcattacatgaacactacaggtggaaggtggttagatcctgaagtttctcccagtcatttcttctttgttcagtttcttacggatggccgaacactagtgttggttgtttgcagcctttgctatgggcacttgagtggaatttgatcagttactttatcaaaattttgatgtgctgaataagttgcaactgccgagtgctaattctattatatagtcttaatatgatggctcctcttgtattggcgttt

SEQ ID NO: 15400 - DNA, 263 bp, Glycine max
  Clone ID: 701070060H2
ccagaaaggagatgggagtcgagaagcagttgttgaggtctggcaccggtccgaagccaattcccggtcagaacgtaaccgttcactgcactggtttcgggaagaacggtgacctttctcagaaattctggagcacaaaggatcctggccagaacccattcactttcaaaatcggccaaggttctgttatcaaaggatgggatgaaggtcgtgcttggcatgcaaattggtgaagttgctcgtctccggtgctctccggatat

SEQ ID NO: 15401 - DNA, 260 bp, Glycine max
  Clone ID: 701070062H2
gttggtatgtcaatggcaatgaaacccgtgatatactatgtggtggacgcgtttactgagtcagcattcaaggggaaccctgcatctgtgtgtttcttagaggaagagagagatgaggagtggctgcaagcagtagccgctgaattcaatatctctgagacttgttacttatcacgcatcacccactcgctccatggaatctctaatccccgttttcgcctcagatggtttactcctgttgctgatgttaaactttgtgt

SEQ ID NO: 15402 - DNA, 264 bp, Glycine max
  Clone ID: 701070064H2
cagagaaacatttcactaatagagagacataagcataatattgagaaataatggagggttgtacttattgtgtgaagttgctatgccttgttgggtttgtggtgcttgtgagtactattgcaggggtggagagtgctggtgaatgtgggaaatctaccaccccagataatgaggcttataagcttgcaccatgtgcctcagcagcacaagatgagaatgctagtgtttctcagagttgctgtgctcaggtgaagaaaattggca

SEQ ID NO: 15403 - DNA, 257 bp, Glycine max
  Clone ID: 701070065H2
ctagcttggacgagtgaattagattcatcattaagatgtcgtctctgatagcagaagatgtgaagagcagatcagaggtgtaccacggggacgaaatgtgccaagtgaagtccaaggagcttctcaaggaaatcgccctccccaacggccttcttcccctcaaggacatggaggagtgcggctacgacagacaaaccggcttcgtctggctcacgcgccagaagagttacacccacaagttcgacaagatcggaaag

SEQ ID NO: 15404 - DNA, 264 bp, Glycine max
  Clone ID: 701070067H2
ctaagactgagcaacttccaacaccatagtgaaatcgcttccaaggctgcacttctcttgtgtttcaatgttctcttcttcaccgtggttagctccacatatgtgccatgcaacccaccccccaaaactccaaaacacccacctgtcccaaagccaccttccccaaagcaagcaagttgccccaaagacactattaagtttggtgtgtgtgctgatgtgttaggtttgatcaacgtgcaacttgggaagccaccaaagacccat

SEQ ID NO: 15405 - DNA, 263 bp, Glycine max
  Clone ID: 701070069H2
agacagtgatacaatacagagtgcgttgttgctccttcgccacaactccctgccatcatgggtacctccagagattctatgcacaagaggcgtgccactggtggcaagaagaaggcatggaggaagaagagccagtatgagcttgggcgccagcctgctaacactaagctgtcaagcaacaagacagtcatgaggatccgggttagaggtggaaatgtgaagtggagggcactgagattggatactggacattactcctggga

SEQ ID NO: 15406 - DNA, 262 bp, Glycine max
  Clone ID: 701070070H2
caccctggaagtcgtgataatttgatcttggatattacaaacaagtggttaagagaaggggtttgttccaatcagatgctgaattgcttactagtcctatcacaaggtctattatcgctagtcaacttcagtcaactcaaggattctttgcggaatttgccaagtctatggagaaaatgggacgaattaatgtcaagcttggatctgaaggagagataaggaaacattgtgcacgagttaataactaagaatctctttgtaa

SEQ ID NO: 15407 - DNA, 262 bp, Glycine max
  Clone ID: 701070071H2
cttcaaacctaacgcagcatcgctattctcttcattccatggcttacgcccaaccagcaaaccgtggattaccctagtttcaaactcgttatcgtcggcgatggtggcacaggaaagacaacctttgtgaaaaggcatctcaccggagaattcgagaagatatctgagccaaccatcggtgtggaggttcacccattggattttttcacaaactgtggaaagattcgattttactgctgggatactgctggacaggagaaat

SEQ ID NO: 15408 - DNA, 262 bp, Glycine max
  Clone ID: 701070072H2
cgcgtttgggagaagaagagcaaaatcgctgtgaaaatgagcggaacggtgaagaaagttagcgatgtagcattcaaggtgggaaggaacatcgattgggatggaatggcgaacttctggtctccgatgaggctcgcagggagttctccaatctccgtcgcgctttcgacgaggttaactcccaactccaaaccaagtttagccaggaacctgagcccattgattgggattactatagaaagggaattggcactcgtttgtg

SEQ ID NO: 15409 - DNA, 251 bp, Glycine max
  Clone ID: 701070073H2
ccacaaaatgtcctctaatccagtaatactgcagagtgtgaacttgaccaagtatatactggagaccagcgtttatccacgagaagaagagactctcaaagagctaaggaaagccactgcaggccacccttggggctttatgggcgctgctcccgatgcgggtcagctaatgaccttgctcttgaagttgttgaatgctaagaagacaattgaagtgggagtttttactgggtactctctactcctcactg

SEQ ID NO: 15410 - DNA, 260 bp, Glycine max
  Clone ID: 701070074H2
ctgaagagccggtggttgtgtggcttttggcggtactaggcatcatcggagccacactcttcatagtgagcttgatccaaacctcggagaacaacttcctatgttccataacaagaacgatgcagcagcagcagcagcagttcaccgatggccccacatcgatgcaacccaaagccatcctccactacgcgacctctcagattgtccctcaacaatctcgttccgagattactataaccttcgacgtgctccaaagcctc

SEQ ID NO: 15411 - DNA, 259 bp, Glycine max
  unsure at all n locations
  Clone ID: 701070075H2
atttgtgcttgtgttngcccgggaaaactgagtccgaaatgatgaagaagaaaccgagcgcgagacacaattcgtcgtcgtcgacgaggcggcgagagaagaagagagcgaatgggaaatgagccccggaggaatgctggtgcagaaaagaaccacgaatacggatgttgtaacacgcaatttgcgcctccgaatcgcgtatggcgctctccgttacgagatctgcgtcagttccatagccactttcggggaagtgaga

SEQ ID NO: 15412 - DNA, 253 bp, Glycine max
  Clone ID: 701070077H2
cagaaactctagccaactagttgtatgctgtcttcatctcggcaaaccatctaacaaatcattcagccagctgaaactttctcacccagagcatgtattggtcaaacgggtatcatcagctgaagaaagttttgatagagcgctacaatcattttcctcatgagtgtcgatgattgaatttctttcaagagttgaacggtgtgaggtcttcccgtgcaatttttacaccttatcgtggctattgtattggttg

SEQ ID NO: 15413 - DNA, 260 bp, Glycine max
  Clone ID: 701070079H2
cgcgttttgtttctttctggaagcttcacttcggcatccatggcgtcgttcgaagaagctcctcccggaaactccaagaacggcgagaagatcttcaagaccaagtgcgctcagtgccacaccgtggacaaaggtgccggtcactaacaaggacccaatctgaatggtttgtttggaaggcaatctggcacaactcctggatattcctattctactgctaacaaaaacatggctgtgatttgggaggtaaagaccttgat

SEQ ID NO: 15414 - DNA, 275 bp, Glycine max
  Clone ID: 701070081H2
atctactgctctatcacacacacacacttactaaaaaacatcaaaagagacatggctgagcaaaccttcatcatgatcaagcctgatggcgtccaaagacgccttattggcgagatcattagcagatttgagaagaaaggtttctacttgaaaggtttgaaacttgttactgtggaccgtccttttgctgagaagcactatgctgatttgtctgccaagcctttctttagtggtttggtggattacattatctctggccctgttgttgccatatc

SEQ ID NO: 15415 - DNA, 263 bp, Glycine max
  Clone ID: 701070082H2
ccaaaaaagaaacaataacaactaaacaagcaccataaattttttaaaacctctcttctttcttctccatcgctgccggagaatgaacattccggcgaccctaacttccccgtcgatgaataatgctcgtctctccgaccaccgtcgccacgtcttccacgaaaacactcacctccaaaaaaccttcactcccttagcctagaagaacaaaaaaaaaccgtacataactacgcataatcccctctttaattctttttttcttt

SEQ ID NO: 15416 - DNA, 261 bp, Glycine max
  Clone ID: 701070083H2
catagataacaccgtactctctaatatcccatactatgaaaaacatggatatggggtggaggaatttaatgaaaccttatatgatgaatgggttaacaagggcgacgcaccggcattgccagagactcttaaaaattacaacaagctgttgtctcttggcttcaagattgtattcttgtcaggaagatatcttgacaaaatggccgtaacagaagcaaacctaaagaaggctggcttccacacatgggagcagtcaatctc

SEQ ID NO: 15417 - DNA, 256 bp, Glycine max
  Clone ID: 701070084H2
tcgaggaaagagaagagatggaagaagatggcaagagagacaacactgattcacccaccaattcgcaacaaacagtttctgatgatgatgaaatagactacacaaccaaaccagagttttatgacccagatcttgatgataacgatgaaaagtggattgataaaaccccgcatggccatgactctgatgctgtgcttagctgccctgcttgcttcaccaccctctgcctagaatgccaaaggcatgacaaatattg

SEQ ID NO: 15418 - DNA, 261 bp, Glycine max
  Clone ID: 701070085H2
cccatctcttgtttctgctttctttcttcaccatgtcacttgctgggaaaatcaccactgaaatctgggttcatgcaaccgctacaaagtggttcaacctcttcgcaacacaactccatcatgttcaaaacctaactgatagagtgcatggtaccaagctgcatcaaggtgaagactggcatcacaacgagacagtcaagcactggacttataccatagatggtaaggttacaacatgtctggagagtattgaatccatga

SEQ ID NO: 15419 - DNA, 261 bp, Glycine max
  Clone ID: 701070086H2
caacaacaagcagatcatctctctctctctctcaaccataatagtcatgggtttgaaggaggattttgagcagtatgctgagaaagcaaagactttgccaccgactcaatcaaacgaagacttgcttatcctttatggattgtacaaacaggccaccgttggacctgtcaacaccagccgtcctggaatgttcaacatgagggacagagctaaatgggatgcatggaaggctgttgaagggaaatccaaggacgaagcatg

SEQ ID NO: 15420 - DNA, 254 bp, Glycine max
  Clone ID: 701070087H2
ctgatggcaacagaatctattatctcttgtttcttctttggttcctctctagcttaaccttcttattggacaaccacgttgtgtttctacgcgtgacaatactactcctattgggtgacattcactcctttgcctacagcacaaatgcttgggcttttcattcctagttggtaccatatgatacaaaaggttgataatctattttacttttttggtacattctgttgcttagtttgtatttcgggttgaatgcc

SEQ ID NO: 15421 - DNA, 261 bp, Glycine max
  unsure at all n locations
  Clone ID: 701070088H2
aaaaaatgtggaagcagtttggagaagatgtcacagttctagtgggagtggacagaanagtgggacactaacccagaagtctataaaatcaaagagtattgagaagtctgataataattctggaagcaatgacgaagatgataatgaaagtataggcctgaataatgtggatggaagtgacaatggtagtggcactcagagctcatggaccaaacgtgctgtagaagttgatagtcataaaccagtttcccagtgggacaa

SEQ ID NO: 15422 - DNA, 256 bp, Glycine max
  Clone ID: 701070089H2
ccaacttagaacacaagtgaactcaaagtggaacaacccaagcttgtttcacagctcaacaacaatggcttctatctcatgcatcacccaccaccccatcacttccaagctcaataatgccttctcttcaccccacgtctctgcctcaaacttggcctcacggtttctgggcaccagaaaaagagttgggttgcatagcctcacctctagaataattggaccctctaatggctccaaagccacatgctggttcagg

SEQ ID NO: 15423 - DNA, 256 bp, Glycine max
  Clone ID: 701070092H2
ctctctctcactctcactctctgctccgtgatagctgtaccacgtttcttctctccatctcgaaacaccatctctgcctcagtcccaacccatcaccattctcatggctgctctagctctagcacttcttcttctggctttcaccggcacttcaagtgctacatggtgcgtttgcaaggatggaagcgacgcgatcctgcagaagacgttagactatgcttgtggagctggtgctgactgtatacctcttcaccta

SEQ ID NO: 15424 - DNA, 256 bp, Glycine max
  unsure at all n locations
  Clone ID: 701070093H2
tccaggatacaatccagaggctttgctaaaacgtcttccactagatgctttgtctcgnagatcatgctatattgttggggattatgaaccgacatgaactgccattatctttgtatgttcttaagcttaatgctccagaattggcattgtcttattgtgatcgggtctatgagtctatgcatcagccatctgcaaaaaattccagcaacatataccttctgcttttgcaaatttatttgaatcctcgaaggaccaa

SEQ ID NO: 15425 - DNA, 257 bp, Glycine max
  Clone ID: 701070094H2
ccaattacatagctcagtaatctgagacagatacaaaaacaatgaaggtttccattgccaagttccactcccttcccctatcttttttccttctcttggccttcaacacaaaacccctcctagcagcagaaccagagccagtggttgataagcaagggaaccctttggagccaggagtagggtactacgtgtggccactttgggctgatgaaggaggcctcacactaggccaaacaaggaacaagacatgccctttt

SEQ ID NO: 15426 - DNA, 257 bp, Glycine max
  Clone ID: 701070095H2
cgttgagcttcctgacaactgccaaggtttgtactattgcaacatcttaagtggcgtcatcagaggagccttagatatggtgtcaatgaaaactgaggtaacttggcttcgtgatgtacttcgtggtgatgatgtgtttgagttgcaggtaaaacttctcaagcatgttcctgaagagtatccatacaaggatgatgagtgaatttgtttttgtagtgatatatgctcgaggtttttattacttcatttctgcagat

SEQ ID NO: 15427 - DNA, 258 bp, Glycine max
  Clone ID: 701070096H2
ccgaaagcgcttaaagcataaatgcaatctatgtccctgacgctgagcaagacgctctccaattcaaagcctctcttcagaatctcttccagcctcgtcgctcacgcatcctccgccacaacctctccgccgccaccttcgccgccagtcccctctccctccgccctcaacagcctcctcaccgctccgtggtccgccactcagtcacgcggaatcacgctttccggatctgatattagagtcgggaatctcattgga

SEQ ID NO: 15428 - DNA, 279 bp, Glycine max
  Clone ID: 701070101H1
cggcatggtagtggtggcagtagcaatagcaaaagttctcgcagtagtcgattatctaagtttgttgatcatctccgcaacttggatgaaaacactgatgagtttgatgtccatctcatgcttgtttctcttgaccaacaaagtacatcaagtttgcagcaaccttacctttgctgtcgaccaactttgtctgtcaggcacctttacgaacacgttgctcgtcagacacatttgccagttgaaggaattgagatactggcagtcaaaggatgctgcagt

SEQ ID NO: 15429 - DNA, 109 bp, Glycine max
  unsure at all n locations
  Clone ID: 701070103H1
ggagaggaagggatgcaaagaaaagaagagagaatagcaggtgggangnagnggggggggggggggnacggaggggagaagggcggagtgcgggggggggggggggggg

SEQ ID NO: 15430 - DNA, 273 bp, Glycine max
  Clone ID: 701070104H1
gagatagtgtggtagagagagaggagcggaggagagaaaatgacgacgaggttcaagaagaacaggaagaagagaggccacgtcagcgccggtcacggtcgtatcgggaagcaccgcaagcatcccggtggtcggggtaacgccggtggcatgcaccaccaccgcatcctcttcgacaagtaccatcccggtttcttcggaaaggtgggtatgcgctacttccacaaactccgcaacaaattctactgccccatcgtcaacattgataagcta

SEQ ID NO: 15431 - DNA, 99 bp, Glycine max
  Clone ID: 701070105H1
ctgctttactgctatcattgtaccatctgattgtaggccctgcatcctgaacaaggtgtatttttcttcttgcattagaattacacaggtacacatatc

SEQ ID NO: 15432 - DNA, 271 bp, Glycine max
  Clone ID: 701070106H1
tgagtttgttgatctagataactagaaacagtgtgatgaaaatgaaggtccttgttttcttcgttgctacaattttcgtagcatggcaatgccatgcgtacgatatgttccctctccgaatgaacactggctatggtgcccgtactccggaggtgaaatgcgcaagttggaggcttgctgtggcagcacacaacatctttcgctttgcgaccattcctgaagagtgcgctgaagcaacaaaggaatacatccatggcgaacaatatagatc

SEQ ID NO: 15433 - DNA, 273 bp, Glycine max
  Clone ID: 701070107H1
ggacactgcggaggctgaacttgcaaggaatgcgttggaggagcaggcgtgggatctcgacaccactctctcacacaaaatcaaagacctcgaggctctcggcatggagtgcaaccaagcccttaagaggttgaagattggtaatggaattcaatatctgctgaatgccaagggtactactcctgctgagataatgggaatcgatcacaaacttgtgctgaagcctgcacttagatccttttctgatgaaatcaagaaaagttctatggaaaa

SEQ ID NO: 15434 - DNA, 274 bp, Glycine max
  Clone ID: 701070108H1
gagagaattatcaaaggtgaaacgaagaagccctaactacgcacgcattcgtgagacaactcaatattcgtcgctcatggcactctcttctcgtctcttttccaaatccaaattgatctatggcagtcaaatacttctacaaaaggagcatgctattccagttcgtcactttgctaaagagtctgcccctcctgcccttaagggagacgagatgctgaagaacatttttgtggaggtgaagaacaaatttgagaccgccataggaatattaaag

SEQ ID NO: 15435 - DNA, 274 bp, Glycine max
  Clone ID: 701070109H1
cttcctcgggaatcgaaggaccaaaaacatcagacccgagcaaatacattcgttacatttataatagagtacatcttgagaatgcaattgttagggccagtgctgtgagcacactggcaaaatttggtgctgctgttgatgtgttaaagccccgcatatttgttctgctaaggcgatgtctttttgacagtgatgatgaggtccgtgatagggctacactttacctggacacacttggaggtgatggttcagttgttgagactgataaagatgt

SEQ ID NO: 15436 - DNA, 272 bp, Glycine max
  Clone ID: 701070110H1
actagaaacagtgtgatgaaaatgaaggtccttgttttcttcgttgctacaattttcgtagcatggcaatgccatgcgtacgatatgttccctctccgaatgaacactggctatggtgcccgtactccggaggtgaaatgcgcaagttggaggcttgctgtggacgcacacaacatctttggctttgagaccattcctgaagagtgcgttgaagcaacaaaggaatacatccatggcgaacaatatagatcagactccaaaacagttaacca

SEQ ID NO: 15437 - DNA, 273 bp, Glycine max
  Clone ID: 701070111H1
gatggccttctctctgttccaaaaccccaccttccttaaacttaaacccccaaccatcgcgacgccgcgctggggctacgttcgggtgcggtgcggtggaccgcgttcccagcgtagccattgatgaaaggccgaatcctgagcatcgaagcaatccaagccatccaaaccttaaaacgccacccaccgaaccaaccctccgaacctctcctccctcgtctccaacaccctcacgcgcctcatcaaatccgacctccttgctactctgcggga

SEQ ID NO: 15438 - DNA, 271 bp, Glycine max
  Clone ID: 701070112H1
gaaaaaaaaacgaataacattttgaggaggttcggtagagtggcgtggcgttttactcacaacatcatcaaaattatcaaatccacctcttccggcaacctcaatttctgctccctaaatcatgcttgcgtttcgatcgaagccttgttgcagttaccaggaaacagcgtccctcgcacttgcacacttcaggcacttggtgttcaactacgcacgccccgggagctctcggtgccctccacgcgccggcttcggggttcggagaggctac

SEQ ID NO: 15439 - DNA, 274 bp, Glycine max
  Clone ID: 701070113H1
gtcgcgctttacaaattctcagtctgcgactctgtgggaatcattaataaacatgggaaaagactcgaagccaaaggagtcaggagggaagggaaaggggaaacaggctgcaagtggaagtgatgagaatgcttctaagggaaaaggaaagggtgggaaaggtggagatgggcttggtacttgcacctatgtcaaagcaaggcatatcttatgtgagaaacaaggtaagatcaatgaagcctacaagaagctgcaggatggttggctttgcaac

SEQ ID NO: 15440 - DNA, 275 bp, Glycine max
  Clone ID: 701070114H1
aataaactccttcctcatttctcatttctcattcaacaccatggcaagaacaaccaagtccattttcttggccttcttactactatgctctttctcactgggggtagtggtagtagcccaagaggaggcaatagcaaaatccgaaagtgaagcattaggggaaccagagaaaagagaaacacttgaaatcatcattggtggaggtggttcactgctccttctccctctccccctacatattgcccacctcctccaccagaaccactgagccggtt

SEQ ID NO: 15441 - DNA, 272 bp, Glycine max
  Clone ID: 701070115H1
accaaaccaaaacccttatctgcactcacttcacacaaaccaaagtttcttaattaccaacacaaaatggatggaggctgtgtcacacacgaaaccaccacatccagcgactctctttccgttccgccgcccagccgcgtcggcagcgttgcaagcgccgtcgtcgaccccgacggttgttgcgtttccggcgaggccgaatcccggaaactcccttcgtcgaaatacaaaggcgtggtgccgcaaccgaacggtcgctggggagctcagat

SEQ ID NO: 15442 - DNA, 274 bp, Glycine max
  Clone ID: 701070116H1
gtcaaccaaaacagcacatgggagttatagaagctatgtgctgagttgcgaaccatcatcaatccaatcttgtgtgttactataagtatttaacagcatagacattagacacattcttcggttctggccaccctcaagtgtaaatacaaccttagcatgaaattcaactttgtgggactacgtgttggagtttgattggtgaacgtggtgtgctaatgccttcttaagttttgcttttctgtcactttcctctgtgatggttgctctcatcact

SEQ ID NO: 15443 - DNA, 278 bp, Glycine max
  Clone ID: 701070117H1
gatccagcagcaatggtgtacgtcaaggctcagaaatcaaaagcctacttcaagagatatcaagtcaagttcaagagaagaagagagggaaaaaccgattaccgtgccaggattcggttgattaatcaggacaagaacaaatataacactccgaaataccgatttgtggttcgctttagcaacaaggacattgttgcacaaataatatctgctagcattgccggcgatttagttcttgctacagcatattcacatgagctgccacgatatggtcttga

SEQ ID NO: 15444 - DNA, 275 bp, Glycine max
  Clone ID: 701070118H1
tctcttccaccgcacactctctgctcctagggtttctccttcgacgtgagggaaatggctcccaaaccgcctagtacgggtctgtttgttggactgaacaagggtcacgtcgtcaccaagaaggaattgcccccacgcccctcagatcgtaaggggaaaacaagcaagagggtgcactttgtgaggaacctcataagagaggttgctggttttgcaccctatgaaaagcgtataactgagttgctgaaggttgggaacgataagagggcactgaa

SEQ ID NO: 15445 - DNA, 275 bp, Glycine max
  Clone ID: 701070119H1
cctcgagccgaatcggctcgaggtgcaagtgtaacccaaaaccctacgcggcgcctgctttcaccgttcgtcttttgcatcagccatcaggatggagtctcaggtgaagcatgctcttgttgtcaaagttatgggtcgtactggatccagaggacaggtgactcacgttagagtgaagtttttggatgatcagaaccgtcatatcatgaggaatgttaaaggaccagtgagagaaggagacattctcaccctactcgagtctgaaagggaagcaa

SEQ ID NO: 15446 - DNA, 272 bp, Glycine max
  Clone ID: 701070120H1
gccaggtggtgctccaaacttctatgttccactggttcagcagggtcaacaggggcagcgctcaggaggacaacgaggagcaggtcctatgcaacagctccagcagccactgccattgatgcaccaacagatgcttccaaggggacatgtctaccgatatcctcctggctccaatatgcaaaatattcaactggcaggagtacctggaggaatggtcagttacggcattggtcaaccaatgcccacacaggccctggcctcggcccttgcca

SEQ ID NO: 15447 - DNA, 272 bp, Glycine max
  Clone ID: 701070121H1
ctaatctgaaggctcccgccatctgcgatcggatttcatggctccaaagaaggacaaggctcccccaccttcatccaagcctgccaagtctggcggtggcaagcagaagaagaagaagtcgagcaagggtaagcaaaaggaaaaggtgaataacatggtgctcttcgatcagggtacctatgacaagctcctctctgaggcacccaaatacaagctcattactccttccattctctctgaccgtttgagccttaatggatcacttgcaagga

SEQ ID NO: 15448 - DNA, 272 bp, Glycine max
  Clone ID: 701070122H1
cgcgttctatatattattgaattgacaatgaggcctgctcttgctttgcttcctcttctatttgctttcttgttagctgccactacagaatcaagaaaagatacaggggaatattggaaaatgatcatgaaagatcaggaaatgccagaaggacttcaaggtcttgtttcatttcaatctgaaaataaccctaagactctcgagcagcttggtaaaggttccaaaaaccattgtgaagagtctctagttacaaatacacaagttaatagtga

SEQ ID NO: 15449 - DNA, 274 bp, Glycine max
  unsure at all n locations
  Clone ID: 701070123H1
gttctgagtattctgatcgctccctgagagagctcgtcgcggcggttgcagaagaagattgcaagatgaagttcaacatcgcgaatcccaccactggatgccagaagaagctcgagatcgacgacgatctgaaactgcgagcattttgggacaagaggatctcacaggaggtcatcggagatgcactcggtgaggaatttaagggctatgtcttcaaaattaccggaggttgtngacaaacaaggatttccaatgaagcagggagtgctgactc

SEQ ID NO: 15450 - DNA, 275 bp, Glycine max
  Clone ID: 701070124H1
gaatgcaagttcttgaatatgttggtaaggagacaatggacttattaatcagtgaaactggaattgaggttgatagggataaggaaggttgaagaagaagcatgacgaagaaggggaagaagcaattgatgtcatcggcgccgtggagaggcgaggagagtgaagaatccttcaaagagggaaagctgaaagtgacgaggcagggtgatggcacttccaccatgcacgtccctgcctccaagtccaagcatcatcaccatgacctccacgacgac

SEQ ID NO: 15451 - DNA, 271 bp, Glycine max
  Clone ID: 701070125H1
atgggaaaaagcaaagaagcgttagagaagtgaacagaaaagtgtaaaataaattaagcggaaccctcgatttgtgcttttcaattttcttccctttctcttgctttgcgttgagttgagtaatactatcaactaagcacttttctgtttgcaatctggagctatgagttcgtcttcggcagatgtttttccagcaattctggaagttatgctggagttccgtgctggcaaaatgtttcttgaggacaaaagggttgttcctgatacacgg

SEQ ID NO: 15452 - DNA, 233 bp, Glycine max
  Clone ID: 701070126H1
gttttacacatgatctaaatttgccgaacattgtaaaactattgagaagtgaaacagatgattttcatatatttttctttattttggcatgttatgtatgaatagaatcgatattttgcaatgttacttcctacatgttcttttcttttttgttgtttatgatgatttacgaaatagttgcaattgtttgagaacggtatgtgataatatctaagatttttgcactcagcaaa

SEQ ID NO: 15453 - DNA, 203 bp, Glycine max
  Clone ID: 701070127H1
agctatcttcatctgcttctgtcacatcaagcattctcataccgcttctcagtttctcattttcccaatcgcagctaaaaaatcctttgagcctttaacctattctcaataagcagaattaggagcaacatgctcagggtgagatgtatagaatgctgtcataggtcttaccacgtgttgcacacaggatgcctgaatattct

SEQ ID NO: 15454 - DNA, 273 bp, Glycine max
  Clone ID: 701070128H1
tccctcccttgttctgcactgcggccgataacaattttctgttttgtgtgatttttttgttctttgtttacagctctgcgagatcttgagtcgccgatttgaaaagatgagtaagcttcagagtgatgctttgcgtgaagccatctcaggaatcatggccgattccaaggagaagaatcgcaaatttgtggagaccatcgaactccaaatcggtttgaagaactacgatccacagaaggacaagcgtttcagtggctccgtcaagttgcccca

SEQ ID NO: 15455 - DNA, 274 bp, Glycine max
  Clone ID: 701070129H1
atatagcccaagccctatacaaccaaaccctaacacacacccatttgattcagtttccatggctagcctcaaggttgcatttttcgctgcagtgctctgcatggttgtggtgagtgcacccatggcacatgcagctatcacgtgcgggcaggtgacgaatagcctgatcaattgcatcggttacctccagaacggaggaacgccgccgtcgggatgctgcaacggagtgaagagcctcaatgccgccgccaagaccaccgccgaccgccagacg

SEQ ID NO: 15456 - DNA, 274 bp, Glycine max
  Clone ID: 701070130H1
gtacaatttttgccaacagttgcaactgtactgtctcctgaggttattgagagagaggctgaatcaggaggaaagcttggggaattggattcatatgagattgaaggtggcgagacaaaagctgaaattcttcagaatctggctgagttccagttttcttgtgtcatgtacaatgctgtgttggagaatgcttgtagtgagcaaggagcaagaatgtctgcaatggacagctctagcaggaatgctggggatatgcttgatcgtctcaccctca

SEQ ID NO: 15457 - DNA, 258 bp, Glycine max
  Clone ID: 701070131H1
ctgaatctgcgtgtgtatgtgaattgttgttgagatctgaatcacaatcagaaacgataatggctacaccggaccacctcttcaacctccgcaacaacttctacctcggcgcttaccaagccgccatcaacagcagcgacgttgccaacctctcccaagaagataccctcgagcgcgacaccctcgtccaccgctgctacatcgccctcggccagctccagttcgtcatctccgagatccacgacgatgctctcacac

SEQ ID NO: 15458 - DNA, 279 bp, Glycine max
  Clone ID: 701070132H1
ctgagtttccagactgcataccttaggtcttccgaattcgaagttaatttgcaagatggctaaggaaaaggctcagatcaacattgtggtggttggtcatgtggaccctgaggagggaaccaccattaacgagctgaagaagcctgttgtggagaaagaagctccagggcatgccatatgagggcatgcacgtacggcctcggaggggaaccagaacattatgttaacagaataatctggaaccctatgtatcagtgtcatcatcagtgtgtagtttag

SEQ ID NO: 15459 - DNA, 226 bp, Glycine max
  Clone ID: 701070133H1
gtcgcttcttcgtaggtgcagctgcaatggtgaagggacgccaaggagaacgtgtcagactctacgtgaggggtacaatccttggatacaaaaggtccaagtcaaaccagtatccaaatacatccctgatccaaattgagggtgtgaatgccaaagaagaagtagcatggtatgctggcaagaaaatggcctatatctacaaggctaaggtgaagaagaatggaag

SEQ ID NO: 15460 - DNA, 267 bp, Glycine max
  Clone ID: 701070134H1
gtttgttgtgagctataagctagtttatcgtgaggagaatatgaagttgtttgttctctttgttgctgcagtagttttggtagcatggccatgccatggcgcaggctaccaaaggttccctctccgaatgacaactggctatggtgagcgttcttcggaggtaaaatgcgcaagttttaggcttgctgtggaagcacacaacatccgagcccttaaaaccattcctgaagagtgcgttgaaccaacaaaggactacattaatggcga

SEQ ID NO: 15461 - DNA, 262 bp, Glycine max
  Clone ID: 701070136H1
cgtcttcttcggtgaatgattgatccctcatcatcatcatcatgggggtgtcagaggagaagctctcgtcgttctactagagccgctggctggtattcgtggccgcaatgtggctgcagtcgtgggccggcatcgagtacttgttcaggagcatatcgcccgtcatacagagctatctgggatacagccagaagcagctcgcgatgctcggcgtcgtcaaggaccttggcgacgccgtcggcttcatgacgggcctgctctg

SEQ ID NO: 15462 - DNA, 271 bp, Glycine max
  Clone ID: 701070137H1
aaggcttatggtggatacctaggcacccagagacgaggaagggcgtagtaagcgacgaaatgcttcggggagttgaaaataagcgtagatccggggattcccgatataggtcaacccttcgaactgctgctgaatccacgggcaggcaagagacaacctgttgcatcattggagcatggtgaaggtgctcatcatgaaggagaggcgaaggagaagaaaggtatattggaaaagatacaagagaatcctcctggttatcactccaagacag

SEQ ID NO: 15463 - DNA, 106 bp, Glycine max
  Clone ID: 701070138H1
ctcgttgtgtaatgttggatgtgttcccaaaacatttgaagaactttgatgtttaatgggtctgtaataatgtcccttgaaaataagttcggtttgtgttgaactc

SEQ ID NO: 15464 - DNA, 267 bp, Glycine max
  Clone ID: 701070139H1
agagtttgttgtgagctataagctagtttatcgtgaggagaatatgaagttgtttgttctctttgttgctgcagtagttttggtagcatggccatgccatggcgcaggctaccaaaggttccctctccgaatgacaactggctatggtgagcgttcttcggaggtaaaatgcgcaagtcttaggcttgctgtggaagcacacaacatccgagctattaaaaccattcctgaagagtgcgttgaaccaacacaggactacattaatgg

SEQ ID NO: 15465 - DNA, 269 bp, Glycine max
  Clone ID: 701070140H1
ctcttggcttcaagattgtattcttgtcaggaagatatcttgacaaaatggccgtaacagaagcaaacctaaagaaggctggcttccacacatgggagcagttaattctcaaggatccacatcttatcactccaaatgcactttcatacaaatcagcaatgagagagaatctgttgaggcagggatacagaattgttggaatcattggagaccaatggagcgatctgcttggagaccacagaggcgaaacaggacctttaagcttccta

SEQ ID NO: 15466 - DNA, 269 bp, Glycine max
  Clone ID: 701070141H1
aactcaaggagatggctctgggaagaggcagtgcagtggttctactactttgcttcttgctgcttcactctcagatggctcgtgctgccacctacacagttggagattctgggggttggacctttaacactgttgcctggcccaaaggaaagctctttcgggctggtgacacacttgctttcaattatagccctgggactcacaatgtggtggccgtgaacaaggctggatatgatagctgcaagactccaagaggagccaaagtgtat

SEQ ID NO: 15467 - DNA, 269 bp, Glycine max
  Clone ID: 701070142H1
gccttggtgcatcatggtggtgctggaacaacggctacaggactaaaggctgggtgtccaacaaccattgttccattctttggagatcagttcttttggggagatagaataaatcagaaagggctaggaccagctccaattccaatatctcagctcagtcttgagaatttatcaaattccattaaattcatgctccagccagaggtaaaatcacgggcaatggaagtggcaaagttgatcgagaatgaagatggtgttactgctgcagt

SEQ ID NO: 15468 - DNA, 269 bp, Glycine max
  Clone ID: 701070143H1
cttcaccgcgcaccacactgagaggaagagggagtgagagagagtgttcttcgtttgctaccttctcccagaaatggttacgttcaggtttcaccagtaccaggtggtcgggagggctctcccaacggaagcagatcagcatccgaagatctaccgaatgaagctctgggccaccaacgaggttcgcgccaagtctaagttctggtattttttgaggaagctgaagaaggtgaagaagagcaatggtcaagttcttgctatcaacgaga

SEQ ID NO: 15469 - DNA, 270 bp, Glycine max
  Clone ID: 701070144H1
cggctcgagctctctctctctctctctcatccacacgaatcacactctccacagtgcgattcattcaccaatggatcgcaacggcgttctctctctcgcattcatctgcattgtagtcgccggcgtcggaggacagtctcccgccgcagcgccgtcacacactccggcaactcccgccgccgccactcccgcccaagcaccttccacagtaccgaaatcaccagctcccgttgcttctcccaaatcatctccaccagctgcaacccctgc

SEQ ID NO: 15470 - DNA, 272 bp, Glycine max
  Clone ID: 701070145H1
gtttcagccatggtatctgtttctctgctcttattcctatctttctttgccttctttgcaccctctgaatctcacgacaaagtctcgttggaattgtactacgaaagcttatgcccctacagcgccaacttcatcgtgaatcacctcccaaaaatcttcaccccagatcttgccccaatcgttcacctcaaactcgttccttggggcaatgccaaactccgtgccaacgccacctttgactgccagcatgggccatatgagtgcttgctgaa

SEQ ID NO: 15471 - DNA, 270 bp, Glycine max
  Clone ID: 701070146H1
atagcttgaaaacacagtgcttgtttagactagtatcttccatggctccgaaagatagaatcctggttttgggacccacaggagccattggaagacacatagtttgggcaagtgtaaaggcagggaatcccacttttatattggttagggacacccctgcctctgttaacaagccaaggcttgtcactgctgctaatcctgaaaccagggaagagctcattcagagcttccaaaattctggagttactctaatccagggagatatgaacg

SEQ ID NO: 15472 - DNA, 274 bp, Glycine max
  Clone ID: 701070147H1
ctcattcccgttttcctttactggtaagttgtaaccctataagccgttgctcccaccgccgccgcgcagatctccgtttcaacttgggttatctctaaggtcctaaacaatcctctttcaaaaacataccgagatgagtgtggaaatgacgacaccatcattggtagagtctctagttcttcaactccatgagatctcagctgtcaaatttggcaacttcaagctcaaatctggcatcttctcaccaatctacatagacctccgcctcatcata

SEQ ID NO: 15473 - DNA, 271 bp, Glycine max
  unsure at all n locations
  Clone ID: 701070148H1
ttgatacatctctattggtctctctctcattcccttaatattgaaccaatgaagcaacaaattggtttgcttttctttgttctccttctttcctctttcttagcttctgcccgtctccttgaaccactgaaaggtccaagacaaggtgagaaggaagtggagatcaatgaaaacgcttttcctcaatcatctcatgagctanaagatgatatggaagaactcatgggatcagaggagtgctatatgaaggatgaagaatgcattagcagaa

SEQ ID NO: 15474 - DNA, 269 bp, Glycine max
  unsure at all n locations
  Clone ID: 701070149H1
ctcttctctctctcgccgtctaggtttttctctcaaaatttcgaaaccccgattttctctcaattcgaatctgcgattcatcgtaacctaaattattagatagttatattatctctctgcgtttctttcagcaattttctattttctcctctcatggcttcagattccaaaaaggatttccctgctgatgacaaagctggaacagaagagagtaaaacatccaaagatgagacttcatctanagattctccagcagaacanagagcgac

SEQ ID NO: 15475 - DNA, 269 bp, Glycine max
  Clone ID: 701070150H1
gataaattgattcaagcagaaggtgtggattctctttcagaagatgaacttcaggaagattgcagagagcgaggcatgcttggacatgctttctgttgaagaaatgcgccaacagcttcgagattggttggacttatctctgaatcactctgttccatcatctcttttgatactttcaaggtcatttactgtgtctgggagattgaaaccagaagaagctgtgcaggctacactttcttctctccctgatgaggttgtagatactatac

SEQ ID NO: 15476 - DNA, 270 bp, Glycine max
  Clone ID: 701070151H1
gaatttacaaagaaattcaaaagcaaagcaagaatcatgaattccaatatttgcaattggaaacaaaatcaggttcttcccacagaggaagcaaagggggatgacacttacctctcagctttgacactatgcttcagccgaattttccctgcaatcttgaacgctgctgttgatctgaatttgtttgatatcatagccaaggcagagagttcatctttgtcagcctcggaaattgcttctttgctgcttccaaatccacaccctcaattg

SEQ ID NO: 15477 - DNA, 263 bp, Glycine max
  Clone ID: 701070152H1
gcacggagcttctgatccgaaagcttccgtttcagcgtttggttcgtgaaatcgctcaggatttcaaaacggatctgaggtttcagagcagtcgctgtttcggcgctccaggaagctgctgaggcttacttggtgggactctttgaagacaccaatctctgtgccattcacgctaagagggttactattatgcctaaggatattcaactcgccagaagaattagaggggaaagggcttaattttgtgatcccttttggtttta

SEQ ID NO: 15478 - DNA, 267 bp, Glycine max
  Clone ID: 701070153H1
gcgaccacctttatattacccttttgatcagagtttaaaatggtgttgtgattctacgagggtcttgcatgcccctttgagtttcaagtttcaagtttgagccccctttctgtaatccataaccatagctttggttgagttgagggatttgattatggataagtatgaggctgtcaaggatttgggagctgggaattttggggtggctaggctcatgaggaacaaggagaccaaggagcttgttgccatgaaatacatcgagcgtgg

SEQ ID NO: 15479 - DNA, 270 bp, Glycine max
  Clone ID: 701070154H1
aacgtgacgaaacagagggattataaaaagagaagttactcgatagttcaaatcagaagatggttcctgtcacaccaactcaataacagatcaaaccaaacccaaactgttaggtttcctttgtttggtgtgaagccatggctgattcttcttccaacctgaaatccgacgcgataatggagcagatgaagcaacacctcgccaccgacgctggcaaacaagtcaccaataaaattggactcgtttatcagtttcacattgctcctaaga

SEQ ID NO: 15480 - DNA, 268 bp, Glycine max
  Clone ID: 701070155H1
ttgagaaaccgctatgggccagctaaaatgccttacactctgctctatccttctagtgaggagggattgactttcagaggaattcccaacagtatctctatctaaggaccctatggttgcttaagtactgttcctggttttaaataaatgtgaaattgaaggaaccagattccttaatcagttgtgtatgcttaagtcatgtatttggagtggctgaatgtatttgtatttgtcattaataaagagagttgtgttagtataatggaaa

SEQ ID NO: 15481 - DNA, 272 bp, Glycine max
  Clone ID: 701070156H1
gaaaactgctgcttctcgacccacttttgaagttcaaaacttaaaccctagttctctctctctttctttctcctgcatcttcaaccatgtcagcaatgctgcaacctcagatcattctgctcaaggaaggcacggacacttcgcaagggaagccacagctggtgagcaacatcaatgcctgcaccgccgtcgccgacgtcgtccgcaccaccctcggccctcgcggcatggacaagctcatccacgacgacaagggaaccgtcaccatctcc

SEQ ID NO: 15482 - DNA, 270 bp, Glycine max
  Clone ID: 701070157H1
gcgcagtcgagcctccagaagacgaatcgaaaatgccgtcgcacaagacattcagaatcaagaagaagttcgcgaagaagatgaggcagaacaggcccattccctactggatccgcatgaggaccgataacaccatcacgtacaacgcgaagcccgtcactggcgtcgcaccaagcttggatactgaggtgtatgctctgcctaggttcaatttatccaattaattagtgttttattttcttgaggcaaaacaatgttttgagtttttaa

SEQ ID NO: 15483 - DNA, 222 bp, Glycine max
  Clone ID: 701070158H1
tgcaaagtgagtgtgcgattcagtactgagtagaggtacatatttccaatcggagtcggagcatctgcgctgcatcggttgcgatcaaggttactggcaccgatactgctatttgatcttcaaggtcttctgtatgagacttgtcgcgtactgtcgtccatagcagtagatgcgcgacaacgccattgtcatggtccgcgacgttctcatctgaatgctgat

SEQ ID NO: 15484 - DNA, 270 bp, Glycine max
  Clone ID: 701070159H1
caacaaacaaactaattaagcaacacacacttcaatttatcagcatggcctccgttcagtgccacaaaacctgcaaagtgagctgccaacaggaaaaccagcacgcctcgtttgggcagaaagtttctgacttgttcaaagggcatcaacataatgaccacagctccaattatgccacccaaaccaaagtgctttcccagtcagggtcagggttaggcaccttcaccaccaaaactcaaacacaatgcggttgcccccaaacacatctca

SEQ ID NO: 15485 - DNA, 271 bp, Glycine max
  unsure at all n locations
  Clone ID: 701070160H1
gtttacagagaagcgaagaggcgcagcgtnagcagtaactcgtggaattgctagcaatggcgaggatcaaggtttacgagctgaggcagaagacgaaggctgatctgttgaatcagctgaaggacctcaaggccgagcttgccttgcttcgtgttgctaaggtcaccggcggtgcacctaacaagctctctaagatcaaggtggtgaggttgaacattgcccaggttttgacggtgatttctcagaagcagaaggccgcgttgagggatgc

SEQ ID NO: 15486 - DNA, 272 bp, Glycine max
  Clone ID: 701070161H1
tctgtctgataactctcttcttctcatcaacaaaaacaaaacttcaatttctctatgattatgataatgatgggttcaaacccaaaaccccttgtgcacctttctcttcttctcctggtcctcttttcttcctcaaccgaatccctgagatttgaaatccaatccgggcacaccaaatgcatctccgaggatatcaagagcaattccatgaccgttggcaagtaccaaatcgttagccccaacgagggtcaacctctgccagatgcccacag

SEQ ID NO: 15487 - DNA, 182 bp, Glycine max
  Clone ID: 701070163H1
ggccactgagatgatggggccaacaatggtggcagaagcaagaacttgtgagtctcagagccaccgtttcaaggggccatgtttgagtgacaccaactgtggctctggtttgcacgaaccgaacgtttcactggaggacactgccgtggcttccgtcgcagatgcttctgcaccaaacattg

SEQ ID NO: 15488 - DNA, 282 bp, Glycine max
  Clone ID: 701070164H1
gaatcggctcgaggcgaaacgacagccatcctatacgaaacgacggactctctaatgactaaatctctaaaacgctcgaaaccctaaaactgtgtcctccgccgttcacatcatcgtcgacgttcagttgctcacactctcaacaggtgagaagagagatgagaggaaggagctatagtccatcgcctcctccacgccacagcagaagaggaggaggagggaggagtcccagccccaggggccgctatcctcccgtctcagacaacaagatctcccctacag

SEQ ID NO: 15489 - DNA, 269 bp, Glycine max
  Clone ID: 701070166H1
ttgaatctcagaattctctaaaagagatctttttctgctctttgaagaaagaagggtctttgcttgattttggagatgtctctgctctcagatctcatcaaccttaacctctccgataccaccgagaaggtgatcgcagagtacatatggatcggtggatcaggaatggacctgaggagcaaagcaaggactctcccaggaccagttagcgacccttcagagcttcccaagtggaactatgatggttccagcacaggtcaagctcctgg

SEQ ID NO: 15490 - DNA, 268 bp, Glycine max
  Clone ID: 701070168H1
atccccagtggcacgcggattaagacccgcaaacggaatattgctgcgccgctggaccctgcagcattctcggatacagtggtccagatttatttggataatgctggtgatctggaacttattgctaagagcattgaatcttcagaccttaacttttcaagatacggcgataccttttttgaggttgttttcactgggggtcgtacacaacctggaactaccaagcctgatgagggggaccgccatccatactctataatagagtgtg

SEQ ID NO: 15491 - DNA, 110 bp, Glycine max
  Clone ID: 701070169H1
gttgaaggcgacctcaagcgcccgagacaccatcgattggcagccaccgcgctgtcacgcaaaggggaagtgtccatacgcgtgagtgcggggcttcccgctataggtcc

SEQ ID NO: 15492 - DNA, 129 bp, Glycine max
  Clone ID: 701070170H1
agtgttcagatagagctgcaggacttgctctcaatgggcatcctatttaataagggagaaatttgtgtcgcaggctcccgtgtgttggttcacgaaggaatctatgatgaatccgagaagaaattggtg

SEQ ID NO: 15493 - DNA, 267 bp, Glycine max
  Clone ID: 701070171H1
cggctcgagaacttttgtttatttaatagtaaatggtgagtgtaaatagcaaaagctgataaacgtggcccaagaaacccaaataatgttcaataaatcagtggccatgcgaggtgatcaaattcaaatgaaaccaaattgctaagaagcttcagatcactaatacgacgacgcattacagaactaagggttgtgttgtgtcgtttcgttttcactctcacgttctcaaattttgtttgtgtatcgcaggaattaggatccgttatg

SEQ ID NO: 15494 - DNA, 268 bp, Glycine max
  Clone ID: 701070172H1
gagctgtgtctggggaaatttgcgttgtttttcgcggtacagctcacacacactgaacggtaagtatggcggacaaggctgttacaatccgaacccgaaagttcatgaccaacaggcttctttccaggaagcagtttgtcgttgatgttcttcatccagggagggcaaatgtttccaaggctgaacttaaggagaagctagctaggatgtatgatgtgaaagaccctaatactgtatttgtcttcaaattccgaacacattttggagg

SEQ ID NO: 15495 - DNA, 269 bp, Glycine max
  Clone ID: 701070173H1
cactgcaacaacgaaaaccaaagaagaaaaaagagtttcttctttccgaaatccaagcagtagggttagggttttttccgatctcaatggcggaggaaccggagagcaccgtcaccaccggcgcccccgacgaatcgctgctcgataagatcaccgagaagcttcacggccacgattcttcctcttcttcctcttcggattccgattccgaaaaaaccgttacttcgtccgttaaggatagggtttttcgcctcttcggaagggagaga

SEQ ID NO: 15496 - DNA, 266 bp, Glycine max
  Clone ID: 701070174H1
cggctcgagcgaacggcgaacgttcgcaagagacgcaacacaaagttgaacgaggaataggcgtgacagggaaaccgtttcattttcaagcgcgtgactttcaaatccaatcttccataccaatggccttcagcaacgctctcagatctgccgcgaagcttgtcgcttcttccgaatcctccctctctaactcagtgagcagaggttttcattcaactggcatgaagaggatgggaggtggacatggccatgatgagccctattat

SEQ ID NO: 15497 - DNA, 266 bp, Glycine max
  Clone ID: 701070175H1
aggatgagacccttggacgagaaggagacgagcgcagtgttcgagaagctgttcaagttcgtcggaaacaacctgaagaacatcgtggagaacccctcgcacgaaggtcccgattcgaaccccgggcgctactgcttccggctccacaagaacaagatcttctacgccagcgagtccctcgtgaagcgcgccaccaacgtcgcccgccccaacctggtctccctcggcacctgcatcgggaaatacacccacggcggcagcttcca

SEQ ID NO: 15498 - DNA, 263 bp, Glycine max
  Clone ID: 701070176H1
gagcaactaccatggctaccgctccttcgcttctacactcatctgggtcctcttttttctctcaatttcgtgcctttcaattctcttcttcttcgctgtttcctcatggaaacaggcatgggaatgccgtggtctctgtgaaggcctctgcttctggggttgtgttggtggagaagtctgaggcagagaaggccaataggctcaaaacagcttacactgagaaaattattcccttgctcatggaagagttctcttacaccaac

SEQ ID NO: 15499 - DNA, 266 bp, Glycine max
  Clone ID: 701070177H1
gacagcttcatactgtcttttgagaacatcatagtctttctccaactgcttggtcttccacctggcccttctattctggaaccatatagcaatttgtcttggttgcaagccaagtgctcttgcaagctgcatttttctctctggctcaagcttgttccccaactcaaagctcttctcaagtgtcttttcctgctccatgttgagccttctcttcttctcccctgcttgtgatccatcatcagacaaatcttcctcagcattattgg

SEQ ID NO: 15500 - DNA, 269 bp, Glycine max
  Clone ID: 701070178H1
cagagagagcgcaatggaggagctattcgtagcagttctatcgatgcttcttgtggcagcgttgatcccactctacctatggaaacgccgtcaagattctcaacctccccctccccaccgcgacgaagctcctcaggctccgcggagagaaaccgtggcgcgcgccgccgccactcgtcgcatgcgtcgccgacctgccgcctctggagctagcacttcggcagatccacctgcgacgcaagaaggatctggtggtgagagtgatgatg

SEQ ID NO: 15501 - DNA, 216 bp, Glycine max
  Clone ID: 701070179H1
caatgatgctttggatcttccaagctttgtgctcaatgaggccatctaacttcaaacatcgtagttaaatgtgacaaaagaaaaatgtaataacgccctagcttgctagaggctggtgctactaataatgtttgtcacaaaaattatataataataggtgttttactcaaaaacaaaatcgaataaaagagataaaagatgaaaaattaggcaaaa

SEQ ID NO: 15502 - DNA, 271 bp, Glycine max
  Clone ID: 701070180H1
gcaaattaatcaaacatggctagggttagtgctttgtttcactctttgctcttgatttcttcccttgtattggcttctcaaatccatgtttcctctgggaaactagtccctggactatcatggaattactatttgttgacatgtcgcaagcttgagaggattataaggaagcatcttgaggatgtcttcgagaaggacagtggagtagctcctggcatacttcgactcttcttccatgactgctttcctaatggatgcgatgcgtctatat

SEQ ID NO: 15503 - DNA, 269 bp, Glycine max
  Clone ID: 701070181H1
gtaatcaatgattgctctgagcatgatgtcgaaggcgtagacgattagccaaactttgacgtcgaagatcgcaaacctgagaatcttcatgcacccaatcttgggatcgacagaatgatcgcaagactcccttctttcccaatcaagggagaggctgttacaaatttggatttcattcggaagaggaagatctctggtgacttcaacatgataatggatcagaaaattctcacatgcgaacaactgcgtgcccttacagtgaaattcac

SEQ ID NO: 15504 - DNA, 265 bp, Glycine max
  Clone ID: 701070182H1
ctcgagccgtctgagcagaggaagccacggcgcggctgttccctttccgatcctttcactcgcagccgggacggtgacggcggacctcctttaatggcggctctgcccccagagtccccgcgactgaaagatggaattcgccgttggaaccctgcaatgaagactgcccgcggtcagagcccctttctctgttccacattgcttgagggcagtgatggccacgcgggctctccaaatttatcattctctattttttttaatttct

SEQ ID NO: 15505 - DNA, 269 bp, Glycine max
  Clone ID: 701070183H1
gaaaagagaaaagaagaatgggcgattaccatttcgtgtacaaggatttagaaggggcttctactcaatgggacgatattcaaagaaagctcggaaatttgcctccaaaggcacccgctttcaagcccccacctttcacccctgcctctgatgatcaacccaaagacaaaacatggatcgattccaaaacctccgaggaactcgaagacctcgaagacaacctcgatgatgatcgcttcctccaagaatacaggaagaagaggctggct

SEQ ID NO: 15506 - DNA, 267 bp, Glycine max
  Clone ID: 701070184H1
cttgtgcatcaaaggaattgttttcttctgcttttggcagggaatgttgctggaccttttagcggcaattggtgtcattcaatctcgtcatttgcggttagatgtggagcacattgaggaagcaatgcagaatattttggtatgtctagagatggttatcttttctgttcttcaacagtatgcttatcatcctgcaccatatagtggagaagttgagaaaatgcttaaacaaaacaagaaaaatgaatgatatgataaggtcaaaag

SEQ ID NO: 15507 - DNA, 267 bp, Glycine max
  Clone ID: 701070185H1
cgctgctgccgaaacccttccggaaccctaaggtaagtgagtaatcagtggttgagaatggtggacaaggcgaagggtagaaaggaggaggtggttacacgtgagtacaccattaacctccacaagcgcctccatggctgcacatttaagaagaaagctcctaaagctattaaggagataaggaaatttgcccaaaaggccatggggaccaatgatgtgagggtggatgtgaagttgaacaagtttgtctggagccagggaatcagg

SEQ ID NO: 15508 - DNA, 267 bp, Glycine max
  Clone ID: 701070186H1
cgcagaactttgtttcccaatttccattgcctccgcttccacctcgcaaccatgatcatcccggagaagaaccgcaaggagatctgcaaatacctcttccaagagggagtttgcttcgcgaagaaggacttcaatttggccaagcaccctgagatcgacgtgccgaatctgcaggtgattaagctgatgcagagtttcaagtctcgcgagtacgtgagagaaacttttgcttggatgcactattactggttcctcaccaacgatggc

SEQ ID NO: 15509 - DNA, 269 bp, Glycine max
  Clone ID: 701070187H1
cctctcattccgtggagatctagtgcttctgctgcaagacctcgctgcaaattagggtttcgattcggaggtagacgaagatgttcggaagggctccgaagaaaagcgacagcaccaggtactacgaaatcctcggcgtttccaagaacgcttcgccggatgacttaaagaaggcttacaagaaagccgccattaagaaccatcctgacaaaggcggggatcccgagaagtttaaagagcttgctcaagcctatgaggttctgagtgac

SEQ ID NO: 15510 - DNA, 157 bp, Glycine max
  Clone ID: 701070188H1
aaaaaacagataaatcagaataaaaacaaaataaaaatccaaagaaaaacaagcaaagacgaaacgaaaacaggtattcgtgaaggaggatcagtaaaaaccaaaaaccaacagacacacactgacggtgaaggtggtcagttcacagccgagtgaa

SEQ ID NO: 15511 - DNA, 267 bp, Glycine max
  Clone ID: 701070189H1
gctgcaactctctaccttccctctttttccgaatctgaatagaaatggcttcggagactgagacgttcgcttttcaggccgagatcaaccagctcctcagtctaataatcaacaccttctacagcaacaaggagacatttcttcgtgagctcatcagcaatgcctctgacgctttggaccagattcgatttgagagtcttacagacaagagcaagcttgatgctcagccagagttgttcattcacattattcctgacaagaccaaca

SEQ ID NO: 15512 - DNA, 265 bp, Glycine max
  Clone ID: 701070190H1
gcgggttttggatttggacttggtcgtcaacacagtctaattaatatctttttgctccttcgcttatgaatcttcttcttcttcttcttgttcctgcaacgcactgaattcgatcaatcaatccatcttcaattgctttgtctcgatcggaggaaaatggccgatcagttatcgaagggagatgaattcgagaaaaaggctgataagaagctcagcggttggggcttgtttggctccaagtatgaagatgccgccgatctcttcg

SEQ ID NO: 15513 - DNA, 266 bp, Glycine max
  Clone ID: 701070191H1
gagaggacgcggtggttcggcggggaacaagttccggatgtcgctgggtctgccggtggcggcgacggtgaactgcgccgacaatacgggggcgaagaacctctacatcatatcggtgaaagggatcaaagggcgtttgaaccgtctcccctcggcttgcgttggcgacatggtgatggccaccgtgaagaaggggaaacccgatctgaggaagtaggttttgccagctgtcattgttcgccagcgcaaccatggcgccgaaagga

SEQ ID NO: 15514 - DNA, 234 bp, Glycine max
  Clone ID: 701070193H1
cccgagcccgactagttctagatcgcgagcggccccctttttttttttttctattactattacttttttttgtttttttttccaccccttagagaactttcccatcttctcctggacctcttttcttcctcaaccgaatccctgagaattgaaatccaatccgggcaaaacaaatggatcttcgaggatatcaagagcccttccatgaacgttggcaagtacaaatcgttaacc

SEQ ID NO: 15515 - DNA, 270 bp, Glycine max
  Clone ID: 701070194H1
cgaaggcgtccaaaccccaaacctacgcattttttcttttccccaaccaacagctccactctttatgttcttgtaaattcttttggctaaagtttcagctttcagaattgaaaaaaaaaatgatcaaacaggttcttcttgttctgctcttcttggcctctggattgaccctctcagtctcagagactgaatctgtttctcttctgcctcacgccgctgagtccttcaatgtcagctatatccagatgaagaacgccgggacttgttctt

SEQ ID NO: 15516 - DNA, 274 bp, Glycine max
  Clone ID: 701070195H1
caatatagcccaagccctatacaaccaaaccctaacacacacccatttgattcagtttccatggctagcctcaaggttgcatttttggctgcagtgctctgcatggttgtggtgagtgcacccatggcacatgcagctatcacgtgcgggcaggtgacgaatagcctgatcaattgcatcggttacctccagaacggaggaacgccgccgtcgggatgctgcaacggagtgaagagcctcaatgccgtcgacaagaccaccgccgaccgccaga

SEQ ID NO: 15517 - DNA, 267 bp, Glycine max
  unsure at all n locations
  Clone ID: 701070196H1
tctctctctctctctctctctctctgttttctctctctcgtctcacttgaaactccacaacccaattttcttttcctatgacccaattccaaatccaaatcaccaattctaattccattcttcaggagttgaattgaattcgtgatgaagagggaccacaaagatagctgctgctgcggcggcgccgcggagggactgtgcagggtgagtgttcctcaatgcagtcanacgtggaagccgagatgtgggagaagagcacagcagcac

SEQ ID NO: 15518 - DNA, 261 bp, Glycine max
  Clone ID: 701070201H1
gtttgagagaagaagggggttaccgtgtttgtttcttcaccgaacgaacaagcatatggtagcttaaagccctagtttcaatgcgaacatcctataatcttgttcttcttcgctctcgcttccgccgctctcacaatttccacgcataccgttccacctccgtcgtaatcctcaaaccagaccaccatccaccagctatcattccctcaaattcccgattccttcttcccggcttcaatgctcatcgccatcgcagtttct

SEQ ID NO: 15519 - DNA, 256 bp, Glycine max
  Clone ID: 701070202H1
gttctcacaaccgagctgtgccgattcagcggtgccaagatctacccagggaaaggcatcagatttgttcgtggtgattctcaggttttcctgtttgctaactcaaaatgtaagacgtatttccacaacaggttgaagccgtcaaagctcacgtggactgcaatgtaccgaaagcagcataagaaggatattgctcaagaagctgtgaagaagagaagacgtgctaccaaaaaaccttactctaggtctattgttg

SEQ ID NO: 15520 - DNA, 254 bp, Glycine max
  Clone ID: 701070203H1
ggcgcaagtcaggaacaagcaagtgcttctaaaggactatgttaccggttttcccaaagaatccgacatgaatattgtcgaaagtaccataacattgaagcttccacaaggttccaatgatgtcttgctcaaaaatttgtacttgtcttgtgatccgtatatgaggaatctcatgaacaagcccgaaggccctcccaatagtcgtgcttacactcctggctctccattaataggatatggtgtgtctaaagtcc

SEQ ID NO: 15521 - DNA, 255 bp, Glycine max
  Clone ID: 701070204H1
actcgagccgaatcggctcgagtagaaacagtgtgatgaaaatgacggtccttgttttcttacgttgctacaattttggtagcatggcaatgccatgcgtacgatatgttccctctccgaatgaacactggctatggtgcccgtactccggaggtgaaatgcgcaagttggaggcttgctgtggaagcacacaacatctttggctttgagaccattcctgaagagtgcgttgaagcaacaaaggaatacatccat

SEQ ID NO: 15522 - DNA, 253 bp, Glycine max
  Clone ID: 701070206H1
gaaaacagtatgtgttttgacgttgggatggctgctatttgattcagagctaactttcaagaatatcatgggaatgattatcgcagttgttggcatggtaatttacagttgggctgtagagcttgaaaagcagtcaaatgcaaagaccttacctcacgtgaaaaacagcatgacggaagaagaaattagattattgaaggttggagtagaaaacagtcctctgaaggatgttgaacttggtgaggcccaagga

SEQ ID NO: 15523 - DNA, 252 bp, Glycine max
  Clone ID: 701070207H1
gtggtctccactgactttatcggcgatagagatcaagtatttttgatgcaaaggctggaattgcattgaataagaactttgtgaagcttgtttcttggtacgacaacgagtggggatacagctcacgtgtcattgatcttcttgtattcgttgccaagaagtctctttaaggtgttacttcaaagtagcttgtcttcacattattaccgtatgtttatgtttagctgcgatttagtgtcttgctcgagcaaa

SEQ ID NO: 15524 - DNA, 254 bp, Glycine max
  Clone ID: 701070208H1
gcaacattgaatagaaaatgcacctcagccttcctccatttgtcatatagaagtgtctcaaaatcttgcttagccgactactcaaaccttttaggacgtgtgcaaatttttttatggtcatccactaatcaagtgttgatcaaaatggcttctatttgtgagatggtattgtagtcctgacataaagaagggttcctgagtgataaaaaaaatgatttacgacacggtactagccaaaagctttagtcgttatg

SEQ ID NO: 15525 - DNA, 254 bp, Glycine max
  Clone ID: 701070209H1
aaagatgaagaagatcaagatggagatcatccagaggatagtgaagacaaagatcaagatcttgattagtcacagtgttttcacgtggtggtgtagtattcaagttgtgtagtagatccataacactgcagaactgataggtgccactggaaaattttcttatcaagcattccagtgttgtggtacaattcatttgcttttgttaaaatacagatctagagcaatcaaacgttgttcattttgattaccaattt

SEQ ID NO: 15526 - DNA, 253 bp, Glycine max
  Clone ID: 701070210H1
cggtttgttttcggcctttgatcttcgattctctctctttttctctcgcgaaaaccgtatcagcaatgtctggagaatcagccagcgctattcacaagggtcaagtcgatctcttagacttcattgactggtctggggttgaatgcctcaatcaaagctccacccactctctccccaatgctatcaaacagggttatagagaagacgatggtttgcatctggagagtgatgcagacgagcagcttttgctcta

SEQ ID NO: 15527 - DNA, 253 bp, Glycine max
  Clone ID: 701070211H1
cagaaaatcctcacccattttcttcgtagccaaacactctgaaattctcagttatgtcgtggcaagcgtatgtggatgatcacctactgtgtgaaatcgaaggtaaccacctcactcacgccgctatcatcggccaagacggaagcgtttgggctcagagcaccaacttccctcagttcaaacctgaggtcataactgccatcaataatgactttaatgagcctggatcacttgctccaactggattgtatat

SEQ ID NO: 15528 - DNA, 253 bp, Glycine max
  Clone ID: 701070212H1
cttgcggctgcagcagagaagcactcatcattcttcgtttgtctacgatccgccttctctgaattgtaaaaatgtcgctcggagaaactgcttgttcatacgcagctctcatccttcatgaagatggaatcagtgtaactgccgacaagatcagcaccttgttggaaactgcaaaggttcaagtagatacctattggccaaccttatttgctaaacttgctgagaagaaaaatcttggcgatttgatagccaa

SEQ ID NO: 15529 - DNA, 252 bp, Glycine max
  Clone ID: 701070214H1
caagttccaggtttcagcgagcattctacaatggctactataccagttaatcccaagcctttcttgaacaatttgactgggaagcctgtaattgtgaaactgaagtggggaatggagtacaagggctatctcgtttccgttgattcctatatgaacttgcagctggccaacaccgaggagtacattgagggacaatttactggaaatttgggagagattttaatcagatgtaacaatgttctctaccttcga

SEQ ID NO: 15530 - DNA, 155 bp, Glycine max
  Clone ID: 701070215H1
cgacattaagaggccccaaaagctgcacacattgcccttcctgtccaggaatttgagatctagcaactaacaaggcaataatgaagttcttgttccagtgcccttgctgctcttgcttttgcttcatgaagccaaagcaagggaacgcaaaggtc

SEQ ID NO: 15531 - DNA, 257 bp, Glycine max
  Clone ID: 701070216H1
gaaagaactgacctcagcggcggcggcggcggcaacagaagaacaaccaccaccacacacaatgggtcgcgtgagaacaaaaacggtgaagaaatcctcccgccaggtgattgagcgttactactcgcgcatgaccctcgacttccacacaaacaaaaagcttctcgaagaagtggccatcatcccttccaagaggctgcggaacaagatcgcgggtttctccacgcatctcatgaagcgcatccagaagggtcccg

SEQ ID NO: 15532 - DNA, 256 bp, Glycine max
  Clone ID: 701070217H1
cggtgtccaacgctgaaccttccggtagcgatcctcagaagtctctggagttggcgaacgagctgatggaaaaaggaaacaaggcaattaaggagaacgattttggagaagcagctgataacttcagccgtgctctcgaaatcagagtggcacattatggtgaacttgctcctgagtgtgtgcacacatattacaaatatgggtgtgcacttttatacaaggctcaggaggaagctgatcctttagctgatgtgcc

SEQ ID NO: 15533 - DNA, 257 bp, Glycine max
  Clone ID: 701070218H1
cctcgagccgattcggctcgagcgaagaagccctaactacgcacgacattcgtgagacaactgaatattcgtcgctcatggcactctcttctcgtctcttttccaaatccaaattgatctatggcagtcaaatacttctacaaaaggagcatgctattccagttcgtcactttgctaaagagtctgcccctcctgcccttaagggagacgagatgctgaagaacatttttgtggaggtgaagaacaaatttgagacc

SEQ ID NO: 15534 - DNA, 255 bp, Glycine max
  Clone ID: 701070219H1
cgaattcccaatctaaaaccctaataccttcaaagaacgaagtagtggatcagtgatggcacctaaggcagagaagaagccagcggagaagaagcccgcggaggagaagaagtcgacggtgggagacaaggctccggcggagaagaagccgaaggccggaaagaagcttccgaaggagggaggagccggcggagaaggggggaagaagaaaaagaggaacaagaagagcgtggagacgtacaagatatacatatt

SEQ ID NO: 15535 - DNA, 253 bp, Glycine max
  Clone ID: 701070221H1
atccggcagaggaggtggtagacaaggtagtgaaggaagcaatgagccagccatggctaccattgcccttaggactcaaacctccttccatggatagtgtgttggctgaactctccaaacaaggcatacccagcatccctcttggcaacaagggttcttctactcctaaaccccgtcgagatgtacgaccgaccccgccaccgggtcccacatagtagtggttttgatgatggggccagccagttacatatca

SEQ ID NO: 15536 - DNA, 252 bp, Glycine max
  Clone ID: 701070222H1
gacaaatggagggtccttagttctgtttctctttcttctctctgttctctcaaccaagttctcaattcaatcttcttcacccttttgatctgctaattctcaaggtattcaaaattgggaggttttcgtttgaattgtgatgtccaagccactgctaggcataggggaggaggaaggtcaaagcaatgtcactttgttggtttcttcctcagtcatcatggaaagtgtgtgcctgaatagctcaaaattgaa

SEQ ID NO: 15537 - DNA, 245 bp, Glycine max
  Clone ID: 701070223H1
gcagaaaagattaggagatggcgaacgcttgattccctgcttcaatcgcattctcatcgagaaaatcgtccctccctccaaaaccagcgccggcattctactcccggagaagacctcccagcttaattccggtaaggtgatagcggttggacctggatcacgtgacaaggcggggaacttgattccggtgtctgtgaaggaaggtgatcacgtgctcttgccggagtacggtggcacgcagatca

SEQ ID NO: 15538 - DNA, 253 bp, Glycine max
  Clone ID: 701070225H1
ccaagttcaaagatgaagatgatccacgttcttttcctctttgctcttgtctcgttcacttcccatgcttctgtcaatgatttctgtgtagcagacctaaaaggtccagatagcccttcaggctatcagtgcaagccacctaacacagtcacagtggatgactttgtgttctctggctttgtagctggaaacaccacaaacactttcaatgctgcattaacctccgcatttgttactgattttccaggtgtga

SEQ ID NO: 15539 - DNA, 253 bp, Glycine max
  Clone ID: 701070226H1
caagatgagaggggtagatgttttgagcccgaaatctctgaggatgagtggcggaagtctcgagctagatctcttaggagaaaagcaatgactgcttcaaccagactcacttatagtctcaggaagcgtaatacacgtgtagcagatagtgactttgcttcaattttcatagaagatgtccgtgatgctaacgaggaaaaagctgtgaattcatttcgtcaggtgctacttacaagagatctgcttccagatt

SEQ ID NO: 15540 - DNA, 252 bp, Glycine max
  Clone ID: 701070227H1
gtgatgaatcataatagtaataggtctggccgggttaaaaagaatagcagcggggccacttgggcagaggaagaagatcaagaagacaacaacatcatcaccctcaccaaacaagcttatggagatttgccgcaacatcattttccccctcaggcgtctctgccttgctctctctgctcgcctcaagcctcgcaaaaacggagctggactgctcaagcttcaggatgatgtacagacatgcggatatcaaga

SEQ ID NO: 15541 - DNA, 252 bp, Glycine max
  Clone ID: 701070228H1
ctcgagccgcactcattaattgcaagaatggcacttcgttgcttggtgatgtccctttctgctctcttcactcttggtcttgcgagagaaagccatgccagagacgaagatttttggcatgctgtttggccaaacactcccattccaagttcattgcgagatcttctaaagcctggccctgcaagtgttgaaatcgatgatcaccctatgcaaattgaagaaacacagtacccgaaaaccttcttctataaa

SEQ ID NO: 15542 - DNA, 252 bp, Glycine max
  Clone ID: 701070229H1
aggcaagtggcgagtgaggaatgcagagaaatgagaattcgtcattggctgagtccttctgaggcaggtggccctgccaaacgcagaagctccggcagaaattgccaccgcaaacacgtcgaagacggtagtaatagcactcggtttcattctcccacattcccaattctgagcgttaagatgagtgagaaagagaaaggcaataatagtgagggacagtcgacgttgctgcacggcaagtacgagcttggt

SEQ ID NO: 15543 - DNA, 252 bp, Glycine max
  Clone ID: 701070230H1
tccctagctcccttcttttactatcttcaatggctgattcaggctcagcctcttcttccagaatgtggtgctccatccccgaacgggttcagctgcatgcggccatgttggccctgcagtttggctatcctggctttcatgtggtctcaagagctgcccttaacatgggcattagcaaacttgttttcccagtctaccgcaacattattgcttttctcctcctccttccttttgcctacttcttggaaaaga

SEQ ID NO: 15544 - DNA, 253 bp, Glycine max
  Clone ID: 701070231H1
cttcaatttctgcaaaatggatccgtctgcggcattgctgtttaaccacctcaaaggtgcagacccgttcttcctgctagcgggtcctaatgtgattgaatcagaggagcacattctgcggatggctaagaacatcaagactattgcatctgaagttggaataccgttggttttcaagtcaagctttgacaaagctaaccgaacatcatcaaaatcatttcgtggcccggggatggttgagggattgaagata

SEQ ID NO: 15545 - DNA, 256 bp, Glycine max
  Clone ID: 701070232H1
gttttctctcttcatcactctctgtgtcgctccgtttcaatggctcagcaagacgctcaaaacggcgggtcggagaatgccgctgctgctgctacggtgtcgtttgtcgctgtgaagccgcagctcctcgtcgaagctcccaaagccaacgacgccattctgttcttcaaggctgcgtttggcgctgaggaagttggccgtacgctcaaccctaagcgcaaagctgagcacgagctccctctcatactctccgcag

SEQ ID NO: 15546 - DNA, 153 bp, Glycine max
  Clone ID: 701070234H1
gtggaaactggcttaagtgacgtgaaggttacagttccagcacttctgatcatgggtgagaaagattatgttatcaactttccaggcatggaggattatattcgaagtgggatggtgaaaaattttgtgccggacttggaaatcatatatatt

SEQ ID NO: 15547 - DNA, 249 bp, Glycine max
  Clone ID: 701070235H1
gtgatttcagtgagtgatcggtgttcacttgatctcatcataatcgtcagcgtcaattgaagaagatgccgatcagaaacatcgccgtcggaaggcctgaagaggcgactcaccccgacacgttgaaggcggctttggctgagttcatctcaaccttcatcttcgtgttcgccggctcaggctccggcatcgcctacaacaagctcaccgacaacggcgctgccacccctgccggcctcatctccgcct

SEQ ID NO: 15548 - DNA, 250 bp, Glycine max
  Clone ID: 701070236H1
gttccaagttgaagatgattcactttcttttcctctttgctcttgtctcgttcacttcccatgcttctgtcaatgatttctgtgtagcagacctaaaaggtccagatagcccttcaggctatcagtgcaagccacctaacacagtcacagtggatgactttgtgttctctggctttgtagctggaaacaccacaaacactttcaatgctgcattaacctccgcatttgttactgattttccaggtgtgaa

SEQ ID NO: 15549 - DNA, 251 bp, Glycine max
  Clone ID: 701070237H1
cttcgagaagcttgctcaggaatcttccagacttgcccgctacaacaagaagcccaccatcacttcaagggagatccagaccgcggtcaggcttgtgctgcccggtgaactggccaagcacgccgtttctgagggtaccaaggccgtcaccaagttcaccagctcttgaacaaaatatcttaactttgtttacctcgctcttgttttgcttcatgtgtatctgttagatctagcgaccctatgtttaggtt

SEQ ID NO: 15550 - DNA, 251 bp, Glycine max
  Clone ID: 701070238H1
caaaaaacacacacgacacactcccatacacacacgttgtctcgcacacattccttcattccgcagcagcaaacatctttaccttaaacgacaacaatggccgatgccgaggatattcaacccctcgtttgcgataatggaaccggaatggtcaaggctggttttgccggagatgatgcgccgagggcggtgttccccagcattgtggggcgtccacgtcacacgggagtgatggttgggatggggcagaa

SEQ ID NO: 15551 - DNA, 250 bp, Glycine max
  Clone ID: 701070239H1
ttcaaatccaaatggccctttacattacactaataattggcctcctagtaaacaccctagtactctataaatagcatttgcatgcaccttagtcttcaccaaaatactcctcttggcatcttgtgttgtgtccctcttttaagctatttccttctcttaacacaattggttgtgccaattgccatagtcaccaaccaattaacaaaggtatatatatcatcatatcatcaccaaatgaaaaatattgggt

SEQ ID NO: 15552 - DNA, 250 bp, Glycine max
  Clone ID: 701070240H1
gaaacaaatctgtcttggtactatagtaaaagttgaagttggggaagtataaagtgaagtgtggtgttattgggttcatgaaattgaaatctgaaactgaacatcagcctccgcagcagtatatatggattcactgcttcttcgatctttccctaatattaataacgcctcttctctcaccaccactggtgcaaatttctccaggactaaatctttcgccaacatttaccatgcaagttcttatgtgcca

SEQ ID NO: 15553 - DNA, 252 bp, Glycine max
  Clone ID: 701070241H1
taaattagagggttagcaagagaaattcacaaacctagtccacattctcatactatggaacacggtggaagcttagtttcagaagatggatccaaaatagaagatacaacctcagagaaagttgagaaggtgaaagaagaagaagatattggcaaagaagagagtggtggtggccttatcaacaacttggtttccactttgatcacacccttgagtccaggcattgggaaagccactgaaaatgaaagtggt

SEQ ID NO: 15554 - DNA, 251 bp, Glycine max
  Clone ID: 701070242H1
gttccagcacaggaagacttccccataatgccattattgagcactgcattcgagctcaggccaaccaatttcttcgagaggaatccggttcttaaaacactttctcccccggatgtccaatggcctggttgccccaagtaaaactagctagccagccatttccattatattagtgtgcttcgagtgctacaactagatgtgttccttggataatgtgaaatgcgatctgcttattgcatgtgcaagaataa

SEQ ID NO: 15555 - DNA, 248 bp, Glycine max
  Clone ID: 701070243H1
agttcgacgagtcggacaagggagagaagaagcagatgctgaaattcttcaactggttcgtgttcttcataagcttggggacactaactgcagtgacggttctcgtgtacattcaggatcatatagggaggtactggggctacgggataagtgtgtgtgctatgctggtggctcttctggtgttgttgtcgggcaccaggaggtaccgctacaagagactggtgggaagtcccttggcgcagatcgcg

SEQ ID NO: 15556 - DNA, 251 bp, Glycine max
  Clone ID: 701070244H1
ctaaattcccgactcctcccaacccattcggttcactccctgcaacatcgaagagtaaagaatgggagacaaaaagaagaaggctcagatgtttgtaaagctagtgtctgctgctgggactggatttttctatgttaagaggaagccaaggcagttcacagagaagcttgagttccgaaaatatgatcctagggttaatcgtcacgttctgtttacagaggctaaaatgaaatgatattgtacctttcatg

SEQ ID NO: 15557 - DNA, 250 bp, Glycine max
  Clone ID: 701070247H1
ctttgtttttcttttaaatttttctttaaatttctcaattgatcaaagatcttcagcaaaccggtcaagtttgtgtagtttggccagatgggaggtgggtttagagtgctacacttagttagaccttttctctcgttcctacctgaagttcagactgctgataggaaagtgccatttagagagaaggtcatatatactgtgatctctctgttcattttccttgtttgcagtcagcttcctctgtatggaa

SEQ ID NO: 15558 - DNA, 253 bp, Glycine max
  Clone ID: 701070248H1
ctgctctgctgcaaatagcgcgttgcatctgctcccaatcattcacattttcgccaaacagccgattccgttaagtgtttctaccgtagcgctcaggaaggaggcattggctggtggtgttggttgtggtggaggtggttttgccgatcagttgtggtagagggtaggaaagacaaaaaaagtggaaaatgagttcagacagccgcagcaggagcaggagcagaagcaggagcccaatggaccgtaagatccg

SEQ ID NO: 15559 - DNA, 253 bp, Glycine max
  Clone ID: 701070249H1
ctccttttctctctctagaattctcagatttgcggggcgagatgatgcagcagccaggacccggcatggcacctcccaccatgggccagcagccgcagcaacagtaccagcagcagcctccgccgcagcagcaacaaccctacgtcatgatgccgccgcagcatcaggcgccgcagcctatgtgggccccatccgcccagcctccgctgccgcagcagcctgctagcgccgacgaggtccgaaccctctggat

SEQ ID NO: 15560 - DNA, 250 bp, Glycine max
  Clone ID: 701070250H1
accaaaccaaaccccattttattcattctcaaaacttctctctagctagctagcaccgttcatcactcacattattctttctgagaatgcattatcaagcagcagcggcgtcgtgggggagctacgtggcgggggccccacggaacagcgcggcggcggcggtggtggtgggggacccactggagcggatagagaggctggcgtcggagagcgcggtggtgatattcagcgtgagcacgtgctgcatgtg

SEQ ID NO: 15561 - DNA, 251 bp, Glycine max
  Clone ID: 701070251H1
gtcgtttcaatctcaaacgccatggcgttttggagatccctcgcgttctctgcgatccttctctcgctcttcatccatggcgctctctgcttctacctccccggcgtcgctccacaggacttccagaagggagatccactgcaagtaaaagtaaacaaattgacttcaacgaagacccagcttccttatacatattattctcttccttattgtccaccaaataaaatagtggatagtgctgaaaatcttgg

SEQ ID NO: 15562 - DNA, 263 bp, Glycine max
  Clone ID: 701070252H1
caagaatgtccataattcacaccttcacttattgcttcatgacaatgtcatccctttatgctgttgtcttcatcctctatggcattgtacctcaagtgtgcctcctcaaaggaatcactgtgtttccaaaggccacggacccttggtttgcagtgtttgcatttgtgtatgtatctactcaaattcaacatttgattgaggttctatctggggatggctctgtggctatgtggtgggatgaacaaagaatttggattctgaag

SEQ ID NO: 15563 - DNA, 250 bp, Glycine max
  Clone ID: 701070253H1
ggaattaaccccgatgggaccatgcctagtgacacctctgttggcattgcacacgatgctttcaacaccttcttcagcgagaccggattcggcaagcatgtgccaagggctttatttgttgatttggaacctagtgttattgatgaagtaagaactggtccttacagacaactctttcaccctgagcaattaatttctggcaaagaagatgctgctaataactttgcaaggggacactacactgttggaa

SEQ ID NO: 15564 - DNA, 251 bp, Glycine max
  Clone ID: 701070254H1
ctcgaatttcgatactttgatcagatccacaacactccttcacgcatgacgcttggctcttcaggatccagtgtcgtggttccaaggaacttcagattgctggaggagcttgagaagggagaaaaaggaatcggagatggaacagttagctatggaatggatgatggtgacgacatttacatgcgctcttggactggaaccattattggcccctataatactgtacatgaaggaagaatttatcaattgaa

SEQ ID NO: 15565 - DNA, 251 bp, Glycine max
  Clone ID: 701070255H1
gaagaagcccatacttgtgggagatagatggcacgcttgtcactgctcattttcgcgttctgcgccgtcgccgtcgccgtcgccgtcgcgggctcctccttcgatgatgccaaccctatccgtttagcgtcggacttggagtcgcaggtgctggacgtgatcggacagagccgccacgctctctccttcgcccgcttcgctcgccgccacggcaagcgctaccgttccgtcgacgagatccgcaaccgctt

SEQ ID NO: 15566 - DNA, 253 bp, Glycine max
  Clone ID: 701070256H1
gcaacctagcagcctccaaatccaatggcttcagagaagaaactttcgaacccaatgagggagataaaagtgcagaagctcgtcctcaatatctctgttggcgagagtggagatcgtctcaccagagccgccaaggtgttggaacaacttagtggccaaaccccagtgttttccaaagcaaggtacactgttcgttcctttgggattagaagaaatgagaagattgcatgctatgtcactgtcagaggtgaca

SEQ ID NO: 15567 - DNA, 151 bp, Glycine max
  Clone ID: 701070257H1
gtttccgagataaccagttttctctttgattcatcaatggcaactgcgaggaccgtgaaggatgtttcgcctcacgatttcgtgaaggcttatgcttcccacctcaagcgttccggcaagatggagcttcctgagtggaccgatattgtaa

SEQ ID NO: 15568 - DNA, 251 bp, Glycine max
  Clone ID: 701070258H1
ggctaaccaaccctgacactccttcttctccgcttcctcttcgatcatcgcttcagaatgccgccgaagttcgacccctcccagatcgtcgacgtcttcgtacgcgtcaccggcggtgaggtcggcgcggcgagttccctcgccccgaagatcggtcccctcggtctctcccccaagaagatcggagaagatatcgccaaggaaaccgccaaggactggaagggcctccgcgtcaccgtcaagctcaccgt

SEQ ID NO: 15569 - DNA, 251 bp, Glycine max
  Clone ID: 701070259H1
cactcttctaacatggcgactcacatcctctctcgcatctcccccaaaaccctaccccccttcctctcccgttctctctccaccgccccctctcctccctccctctccgcgctctccttcctccgccgcatctccgttgccgccaacccctccctccaccgcgccctcctccccaactctccctccctccgcgccctctccacacgcgccactacctcctccctcaacgaccccacccctaactggtccaa

SEQ ID NO: 15570 - DNA, 249 bp, Glycine max
  Clone ID: 701070260H1
cagataactagaaacagtgtgatgaaaatgaaggtccttgttttcttcgttgctacaattttcgtagcatggcaatgccatgcgtacgatatgttccctctccgaatgaacactggctatggtgcccgtactccggaggtgaaatgcgcaagttggaggcttgctgtggaagcacagcacatctttggctttgagaccattcctgcagagtgcgttgaagcaacaaaggaatacatccatggcgaacaa

SEQ ID NO: 15571 - DNA, 247 bp, Glycine max
  Clone ID: 701070261H1
gttcttcttcttttgttgttctgtgtttgtgtttgttttttctctcacctgaaaatgtcttgctgcggtggtaactgtggttgcggaagctcctgcaagtgcggcaacggctgcggaggctgcaagatgtacccagacttgagctacactgagtcaaccaccaccgagaccttggtcatgggagtggcacctgttaaggctcaatttgagggtgctgaaatgggtgtgcccgctgagaacgatggct

SEQ ID NO: 15572 - DNA, 252 bp, Glycine max
  Clone ID: 701070262H1
cccaaaccatttccattcactaccacaccacccgcttcttacctcaacccgatgtcttcattcgcacttcccacggaacacgcattccagcccacgccggcattctggcttccatgtcccctgtttttgacaactttatagatcgcccacgtaagcatcggagctccgagagaattatccaaatccacggcgtcccctgcgacgccgtcaccgccttcgtcggattcctctactcctccaggtgcacggagg

SEQ ID NO: 15573 - DNA, 248 bp, Glycine max
  Clone ID: 701070263H1
caagaaatcattttaaggctaaggttgttttgcttgtctcatgatctttttttctggatacattttcattgatttgtagtgggtgacagctgtttcagcattgaagctactactcctattgtaaacagtgagattcaatttttttcaggttaaacttcttttgggaatgcttgtcacgagtgtgggctcgaggctgttaaagccgtcatgcctgaagaacacatgaaacttctttccaacatacgcaa

SEQ ID NO: 15574 - DNA, 251 bp, Glycine max
  Clone ID: 701070266H1
gaactcgcagcaccaccaccagcaccaccaccagcaccgttctattcttcttccacaatgggtatctctcgtgattccatgcacaagaggcgcgccaccggcggcaagaagaaggcttggaggaagaagagaaagtatgagcttgggaggcagccagcaaacacaaagctatcaagcaacaagacggtgaggaggattagggttcgcggccgaaacgtgaagtggcgtgctttgaggcttgataccgggaa

SEQ ID NO: 15575 - DNA, 248 bp, Glycine max
  Clone ID: 701070267H1
cttggaaccgttcttcgtgttctccattccctctctcactccttcatctacttcacatattatatcatcacatatcatagtgatatcatatcacaatgtgtggcatacttgctgtgcttggttgctctgattcatctcaagccaaaagggtccgcgtccttgagctttctcgcagattgaagcaccgtggtcctgactggagtgggctccatcaatatggtgataactatttggctcatcaacggtta

SEQ ID NO: 15576 - DNA, 247 bp, Glycine max
  Clone ID: 701070268H1
cttctttcctcacttcaaacttgacaaaaatggcaacagaattggcatcatctcccaattgggttccaagcgcaccacatgtttggcagcctttgccgccctccttctcctcttcctccgcggtctccgccgccgccgatacaacctccccccaggcccaaagccctggcccatcataggcaacctaaacttaattgggtcccttccacatcggtcgatccacacgcttagcaaaatctacgggccc

SEQ ID NO: 15577 - DNA, 247 bp, Glycine max
  Clone ID: 701070269H1
cgagtttgttgtgagctataagctagtttatcgtgaggagaatatgaagttgtttgttttctttgttgctgcagtagttttggtagcatggccatgccatggcgcaggctaccaaaggttccctctccgaatgaaaactggctatggtgagcgttcttcggaggtaaaatgcgcaagttttaggcttgctgtggaagcacacaacatccgagcctttaaaaccattcctgaagagtgcgttgaacca

SEQ ID NO: 15578 - DNA, 248 bp, Glycine max
  Clone ID: 701070270H1
gaagaacaagagatgagtcagggtggtcacgcaggaggaggatcccattccctggcgtttcgcgtcatgcgtctgtgccgcccttccttcaacgtcgaacctcccctccgcctcgaccccgccgacctcttcgccggcgaggacctcttcgacgaccccgccgccaatcccccctctttctcctcctcctccgactccgatcccaactaccgcaaccgcttcctcctccgccacttctccgacgccat

SEQ ID NO: 15579 - DNA, 247 bp, Glycine max
  Clone ID: 701070271H1
ggaccattattaaggcctcagtttgttatgttcggttcttccattgttcagtatggtctttatgatgaaggttggatggctgatctttctcacttgtatgctcgcaaggttgatatagttttgcgaggatatgctggttggaattcaaggcgtgctctgcaggttctggataaaatctttcctaaggatgcccctgtacaaccttcattggtcattgcctactttggtggtaatgattcttctactc

SEQ ID NO: 15580 - DNA, 249 bp, Glycine max
  Clone ID: 701070272H1
ggcggagttgttggaaaaggccaaaaactatgttgcggagaaagtcaccaacatgcccaagccagatgcgagtgtcaccgacgtggacttcaagcgcgtgagccgcgacaggttcgagtacttggccaaggtctccgttcagaacccttattccacttccattcccatttgtgagatcaagtactccctcaaaagtgctggcagggagatagcagcaggaacaatacctgacccagggtcattgaaggc

SEQ ID NO: 15581 - DNA, 244 bp, Glycine max
  Clone ID: 701070273H1
ccaaaatgtgcccttccgcctcccatttccgaccggcattccacgccctcgacgccgcccacgacggcaaaatcagccacgacgacctccgcgccttctacgccggagtcggcggagaaggagacgacgtgatcggggcaatgatgacgctggccgacaccaacaaggacgggttcgtggagtacgaggagttcgagcgcgtggtcgcggcggagagaaaacccgtcgcgtgtggggccatgga

SEQ ID NO: 15582 - DNA, 247 bp, Glycine max
  Clone ID: 701070274H1
agttgctgcgtcgcaaggtaccggcggcgacggagagctatcttctcaatttccgatcactgcattggttctgttgacgagggttttgttctacttgacttgcatacttgatggcgtcaaagttgcagaagttgcagtccgcagcatgtcaagcatctcaatttgtatccagtcgtggaactaactactacaggcaattgctggaacagaacaagcaacacattcaggagcctcctacagtagagaa

SEQ ID NO: 15583 - DNA, 246 bp, Glycine max
  Clone ID: 701070275H1
attagggttttcgctgaccggtgcgcagtcgagcctccagaagacgaatcgaaaatgccgtcgcacaagacattcagaatcaagaagaagttggcgaagtagatgaggcagaacaggcccattccctactggatccgcatgaggaccgataacaccatcaggtacaacgcgaagcccgtcactggcgtcgcaccaagcttggattctgaggtgtatgctctgcctaggttcaatttatccaattaa

SEQ ID NO: 15584 - DNA, 248 bp, Glycine max
  Clone ID: 701070276H1
ataaagactatgatttgtgaaaaagtgtgataatacataaaatttggttttcattgcaaagcttcactcaaagaaactggttttcacacgttacaatcattttgaacctagcactccaaggccactacttccaaaagagctcataaatctcattcacatcatcgaacagagattcacaaaaatgacatcatattccatacagtgaatgtaatgttggatatttgggaattgaaaggtctgtataccta

SEQ ID NO: 15585 - DNA, 246 bp, Glycine max
  Clone ID: 701070277H1
ctctgttctctgtcactgctgcgtctctcgtaaccatgcctaagccaatccacgagattaaggatttccttctcactgctagaaggaaggacgcaaggtcggtgaagatcaagaggagcagagatgtggttaagttcaaggtcagatgctcgaagtacctctacacactttgtgtgtttgacccagagaaagctgataaattgaagcaatctcttcctccaggtttgagtgttcaagacctgtaaa

SEQ ID NO: 15586 - DNA, 248 bp, Glycine max
  Clone ID: 701070278H1
ccgaaacccttcccgatccctaaggtaagtgagtaatcggtggttgagaatggtggccaaggcgaagggtaggaaggaggaggtggttaccagagagtacaccattaacctccacaagcgcctccatggctgcacatttaagaagaaagctcctaaagctattaaggagataaggaaatttgcccaaaaggccatggggaccaatgatgtgagggtggatgtgaagttgaacaagtttgtctggagcc

SEQ ID NO: 15587 - DNA, 250 bp, Glycine max
  Clone ID: 701070280H1
acacagaaaagttagggttcacaacttttccttttccttttgcttgcgaatctgaatcaaataatcaatcatccattcattattcatcatgtcgtcaccgaagaaaatcacgctgaagagttcggacggcgaggctttcgaggtggaggaggcggtggcgctggagtcgcagacgataaagcacatgatcgaggacgactgcgccgacagcggcatccctctgccgaacgtgacgagcaagatcctggcg

SEQ ID NO: 15588 - DNA, 252 bp, Glycine max
  Clone ID: 701070281H1
ccctaattcgctcgcagtcacccaagaggcgaatccttaccattgctcgagatgggtgaagaagtgaaggccgtggttccagagtctgttttgaagaagcagaagagagacgaggaatgggcgttggccaagaagcaagacctcgaggctgcgaagaagaagagagccgagagccgcaaactcatctacaacagagctaagcagtacgctaaggagtacgatcaccaggagaaggaattgattcggttgaaa

SEQ ID NO: 15589 - DNA, 249 bp, Glycine max
  Clone ID: 701070282H1
cgaccctggaggcttcagtttactgttgattttcgtgttatgcttctaccaatgccataagcttgaagcaggaactaaatatggctgacttgttggaatggtcaaagcaagataagaaacgaatgcttcatgtcgtctaccgtgttggtgaccttgatcgcaccatcaaattttacacagaatgtttaggaatgaagcttttgaggcaaagagatatcccagaggagaaatatgctaatgcttttcttg

SEQ ID NO: 15590 - DNA, 248 bp, Glycine max
  Clone ID: 701070283H1
ctcctggtgacaatgtgggattcaatgttaagaatgttgctgttaaggatttgaagcgtggttatgttgcctcaaactcaaaggatgaccctgcaaaggaggctgctaacttcacagcccaagtcatcatcatgaaccaccctggtcagattggaaatggctatgcccctgtcctcgactgccacacttctcacattgctgtcaagtttgctgaactcatgaccaagattgacaggcgatccggcaaa

SEQ ID NO: 15591 - DNA, 248 bp, Glycine max
  Clone ID: 701070284H1
ccgatctgcactgcaacttccttgtctgacagatcccgtgttccggagaaaggaaaaggcaagaaagatgtcggggcaaacgcagcgtctgaacgtggtccccaccgtgacgatgctgggagtggtcaaggcgcgtctagtcggcgccacgcgcggtcacgcgtcctgaagaagaagagcgacgcgctcacggtgcagttccgccagatcctgaagaagatcgtgtccacgaaagaatctatgggcga

SEQ ID NO: 15592 - DNA, 247 bp, Glycine max
  Clone ID: 701070285H1
caaagtcttccatagccccccaaaaatgaagagcaccatcttctttgctctctttctcttttgtgccttcaccacctcatacctaccttcagccatcgctgatttcgtgctcgataatgaaggtaaccctcttgaaaatggtggcacatattatatcttgtcagacataacagcatttggtggaataagagcagccccaacgggaaatgaaagatgccctctcactgtggtgcaatctcgcaatgag

SEQ ID NO: 15593 - DNA, 248 bp, Glycine max
  Clone ID: 701070286H1
cgaaactgcaaagaattggcagcacagcccgatgttgatggatttttggttggtggtgcatccctcaaggcggaatttgtggacatcataaacgctgctactgtgaagaagaattgaaattcgtagttaggaactgataatgctgcctttcaagctgcttcggaaattgctgtttttgagttttggttctgtgctttgtggccaatgtattgaactctgtttagtacctgaataaacatgctttcctt

SEQ ID NO: 15594 - DNA, 247 bp, Glycine max
  Clone ID: 701070287H1
cgtggctcagtgcttaggtgctatctgtggagttggtttggttaaggctttccaaaagtcttacttcaacaagtatggtggtggggctaattccctcgctgctgggtacagcacaggtactggattgggtgctgagattattggaacctttgttttggtctacactgtcttctctgccactgaccccaagaggaatgccagagattcccatgtgccggttttggctccacttcccattggatttgct

SEQ ID NO: 15595 - DNA, 250 bp, Glycine max
  Clone ID: 701070288H1
ctctatcgagtaaattaactatgaagcctaccctactattatccctttccttcctgcctctctttgctttcctggctctttcagaagatgttgaacaagttgtggacataagtggcaaccccattttcccaggtggcacatattacattatgccatcaacttggggcgctgccggtggtggattgaaactaggccggacaggaaactcaaactgcccagttactgttttgcaagattactcagaaatctt

SEQ ID NO: 15596 - DNA, 247 bp, Glycine max
  Clone ID: 701070289H1
ggtagacagacaggtagtgctttgaacaagaaaaaagttgcgctgtgttgcctattgttttctgtatttagattttttcgtcaacttttccgattttttcctcacttgttgtgaataatctggcagaggcggcagcaaataagaatggcttcaaatcccaaacctttgacttttgaggaggtggctaatcacaacaacaaaaaggattgctggattattatcaatggaaaggtctgtttcttcttga

SEQ ID NO: 15597 - DNA, 247 bp, Glycine max
  Clone ID: 701070290H1
gttgatcgagataactagaaacagtgtgatgaaaatgaaggtccttgttttcttcgttgctacaattttggtagcatggcaatgccatgcgtacgatatgttccctctccgaatgaacactggctatggtgcccgtactccggaggtgaaatgcgcaagttggaggcttgctgtggaagcacacaacatcttcggctttgagaccattcctgaagagtgcgttgaagcaacaaaggaatacatccat

SEQ ID NO: 15598 - DNA, 247 bp, Glycine max
  Clone ID: 701070291H1
gaaagcagcttgaagatggacgtacgctggcagactacaacattcaaaaggagtctacccttcaccttgtccttcgtctgaggggaggtatgcagatctttgtgaagactttgacagggaaaactatcaccttggaggttgaaagttcagacacaattgataatgtcaaggcaaaaatacaggacaaggaaggtatccccccagaccaacagaggttgatctttgctgggaagcaactggaggatgg

SEQ ID NO: 15599 - DNA, 247 bp, Glycine max
  Clone ID: 701070292H1
tccaagttcaaagatgaagatgatccacgttcttttcctctttgctcttgtctcgttcacttcccatgcttctgtcaatgatttctgtgtagcagacctaaaaggtccagatagcccttcaggctatcagtgcaagccacctaacacagtcacagtggatgactttgtgttctctggctttgtagctggaaacaccacaaacactttcaatgctgcattaacctccgcatttgttactgattttcca

SEQ ID NO: 15600 - DNA, 121 bp, Glycine max
  Clone ID: 701070293H1
ccgagattttaatcgttgaattttgactcttgcactatacaactttattgtggctgtcatattcatgaagtaatctttctattccttacctagtatttgactgggtttttggttttcgtac

SEQ ID NO: 15601 - DNA, 247 bp, Glycine max
  Clone ID: 701070294H1
gatcattgtagatggatgatgacagcgatagtgatgaggagagtgatgaagagacccctgctaagaaggtaatgatattgctgttgtattgtgtattgttttgtttggtcacatatgttaatgtcttctatatgattggtgagtagtgagcaaacttcaccagctcttatatgtgactttattttgtgaaggtggatcagggcaagaagagaccaaatgagtctgcagcaaaaactcctgtttctgc

SEQ ID NO: 15602 - DNA, 251 bp, Glycine max
  Clone ID: 701070295H1
cttaagcttgctactgagtttccacattgcataccttaggtcttccgcaattcgaagttaatttgcaagatgggttatgaaaaggctcagatcaacattgtcgtggttggtcatgtggaccctgaggaggcaaccaccattaacgagctgaagaagcctgttgtggagaaagaagctccagggcatgccatatgagggcatgcacgcacggcctcggaggggaaccagaaaattatgttaacaaaataatc

SEQ ID NO: 15603 - DNA, 286 bp, Glycine max
  Clone ID: 701070301H1
cgctcgaggcaaggtgtactagtttcagagatcgcatatacaatcaaaccaacattgatagaacatttgcattggccaggcagaggaggtgtcctaggactaatggcacaggtgacaacaatctagcaaatctagacttcagaactccaatcattttgacaacaactacttcaaaaaccttctcatcaaaaggggactcctgaattctgatcaagtgcttttcaatggtggatcactgattcactggtaagaacttacagccagaataacaaggcatttgatactg

SEQ ID NO: 15604 - DNA, 277 bp, Glycine max
  Clone ID: 701070303H1
cactcattaattgcaagaatggcacttcgttgcttggtgatgtccctttctgttctcttcactcttggtcttgcgagagaaagccatgccagagacgaagatttttggcatgctgtttggccaaacactcccattccaagttcatgcgagatcttctaaagcctggccctgcaagtgttgaaatcgatgatcaccctatgcaaattgaagaaacacagtacccgaaaaccttcttctataaagaagaccttcatccaggcaaaacaatgaaagtaca

SEQ ID NO: 15605 - DNA, 280 bp, Glycine max
  Clone ID: 701070304H1
gcggaatctgctagaattttctaataatggcgaaagacgttgagcaggtcacagagcaaggtgaatactccgcgaaggactaccatgaccctcctccggcaccgttgatcgacccagatgagctcacaaagtggtccttgtacaagccgccatagctgagttcatagcaacactcctttttctttacatcaccgtgttgaccattattggctacaagagacagagtgacaccaaaatccccggtaacaccgaatgtgacggcgttggcattttgggcatc

SEQ ID NO: 15606 - DNA, 276 bp, Glycine max
  Clone ID: 701070305H1
caagaacttgttcaaagggcaagagagaagctgaagaactccggtttcactcaaaaaccgggactctattgcagtgatcatcatgttgatgctccttttgtgtgttgatctgttctcatctgatgcagagaaagagagaatatatgtgttgtttatagtctgcttgtgtattgctgtatagttggagactcaaaatgaagttaatgttttcatccagttatcatatgctgctctattatcaggaattatattccttcaacattttagcccttgttg

SEQ ID NO: 15607 - DNA, 277 bp, Glycine max
  Clone ID: 701070306H1
cgcaaaaatggcacctgcaacactgtctctgtctctcctcctcctgttctcactcagcatcgccgtaaccgttagatcgagcgactacgactacgattgtgtgtacactgcatacgttagaaccggttcggtgttgaagggcgaacggactctaagatcgggctgaagctgtacgacaagtacggctactacatctacattaaaaacctcgaagcatggggcggcttgatgggcaagggctacgactacttcgagcgcggcaacctcgacatcttca

SEQ ID NO: 15608 - DNA, 277 bp, Glycine max
  Clone ID: 701070307H1
cccggtcccttgtgatttgctcacaaaaccagtgtcggtcacaccatctctcccttttctccacctgcaacgatgtccgttaaggagtgccaccaccaccacaagggaaagaagcacaagctctggagacgcatcttctgggaatagtgatcttcgccttcatcgtgttactgacagttcttataatctgggcaatcctaaagccttcaaaaccaaccttcatcctccaagacgtcaccgtttacggcttcaatgccaccatccccaacttcctcac

SEQ ID NO: 15609 - DNA, 273 bp, Glycine max
  Clone ID: 701070309H1
atcatctcctcaacgcaagacagaagctttgagaaagaaattgttacattctatgaatgagctagagaaattgaaaccgaaagtgcaacagaagatcaatgagtttaacagcaggcgagcatatcaacccaatgggtggggaaatgtcattcaaataattttatggatttttctccagcaaaaaagcaaactttgactagttataataaaaaaaaggcagtcataccaaccactggagagtttgtttaccaaggatcaaggggccaacagttt

SEQ ID NO: 15610 - DNA, 269 bp, Glycine max
  Clone ID: 701070310H1
cggggtatcatcttccaggtgagacagaggaagaattttcaaccagattagccaataatttggagcagttgattctgaaagagggaccagagactattgctgcatttattgctgaacctgtaatgggggcaggaggtgaatacctccaccatcaacttattttgagaaggtccaagccgttgtcaagaagtatgacattctttttattgcagatgaggtaatatgtgcctttggaaggcttgggacaatgtttggatgtgacaagtaca

SEQ ID NO: 15611 - DNA, 271 bp, Glycine max
  Clone ID: 701070311H1
ctgggtattcttttgcttccatttatcatgagcaacatcccaagatctctcaccgactcttccctaaccctcttcaaccttgccatatcatcctctgacccctggcctttctcactcgttttcttatagccctaattacgtgttaataattctcactccacttttcttaaaccttgctctttctttctttttttcccctatccctttagcttaattttgtggctacgttatggggatccttagcgatcatcataatcagaagcatcaccac

SEQ ID NO: 15612 - DNA, 269 bp, Glycine max
  Clone ID: 701070312H1
cgtgttcggattgcggcgacgtgagccgttcgctgcccgcgacgtcgtgagaagtccactgaaccttatcatttagaggaagaagcgaagttacgtagccagcgagaagatttcagtgacatggttgcagagaacgagagaagaggaaaagaaagatgcaagacaaagagggcaagtcaaagaagagagacttcaagttttaggctgcgcctagttcgtttcttttgctggaagatgggcggctgctaccctttttctactggggaagt

SEQ ID NO: 15613 - DNA, 269 bp, Glycine max
  Clone ID: 701070313H1
ccgctcgagcggctcgagctttgcttttgctcagtgagcttccagttgtattcatggacttaccggagaagcttttctttgcagcatttctcattctttcagtggccattgatggaacgcaggcagacaccatggtcatggcactgtcttctgtgaccaatgcaaagacggacagagatcccttttcgattatcctattaatggtgcaaaagtaactctgtcctgtgctgacagtaatggacaaattacaatgtcaagagaagacacaa

SEQ ID NO: 15614 - DNA, 272 bp, Glycine max
  Clone ID: 701070314H1
ctctaaacctcttgtgtgctgttcgcactctagactaactgagattttagctttttattgtttttctttttcccttttccatttcagagcagcgaggtgtttagtgtgcaattgttgacaaattaatggcggaaattgtgggcctcgcttgtactgctgttgtaattgtagaaaccaagtctcccttcacgatgatataattgctaaaacctttcagggaagatatggccgaggttttctgttctcccatgcaatgaatattgtggtagggc

SEQ ID NO: 15615 - DNA, 276 bp, Glycine max
  Clone ID: 701070315H1
cttagttcttgttattcattattcattctcagcttcttttcttctggggggcaaaaggggtcacttttcagatccgagattgagctcctttacccatcatcatcatggagctcctcgggtacctgaatcagggtcaccctctagaggaacaacacttgttattactctttcattggtgctttcgacacttgtgtccttctccactttcacacatgccttctccctctctgcgtttccggaactgaatcctataaaacctaggcactcacgtcttct

SEQ ID NO: 15616 - DNA, 214 bp, Glycine max
  Clone ID: 701070316H1
catttgcagggtgttcttgtttgtgttttgttgtgatactctgttaattttgtgtttttttcatcccttgacctgaatatctttttcgggattttggattgttttggggcactctgtgtctgtcttcgtggctggatttcgagtgtttagggattttatttttctgcttgtcttcattattgttaacatggtgccctctgattgaacagtagtt

SEQ ID NO: 15617 - DNA, 272 bp, Glycine max
  Clone ID: 701070317H1
gataagaagcagttgatcgatgacgtcaggcaggctctgaatgcttccaagattagcagttatgctcaggggatgaatttgttgagggctaagagtaatgagaaaggatggaacttgaatttgggggagttagctaggattggaagggagggtgcatcataagggccgtgttcttggaccggatcaagaaggcttatcagaggaaccctaatttggcgagtttgattgtggacccggagtatgcaaggcgaatagtccagagacacgctgcg

SEQ ID NO: 15618 - DNA, 277 bp, Glycine max
  Clone ID: 701070318H1
ctttgttgtgagctataagctagtttatcgtgaggcgaatatgaagttgtttgtcttctttgttgctgcagtagtcttggtagcatggccatgccatggcgcaggctaccaaaggttccctctccgaatgaaaactggctaggtgagcgttcttcggaggtacaatgcgcaagtcttaggcttgctgtggaagcacacaacatccgagcctttaaaaccattcctgaagagtgcgttgaaccaacaaaggactacattaatggcgaacaatttagat

SEQ ID NO: 15619 - DNA, 275 bp, Glycine max
  Clone ID: 701070319H1
cgctccgaattagggttttccaattcgcagagcaactcaacacaacgaaccaaaccaacaatgtcgcagccgcagcctcagtcgcagccgcaacacgggcaagcggcgctggagcaggtgcagtgcttcggtcgcaagaagcggcggtggccgtgacctactgcaagcgcgggcgcggcctcatcaagatcaacggctgccccatcgagctcgtcgagccggagatcctccgctttaaggccttcgagcccatcctcctgttgggaaagagccgc

SEQ ID NO: 15620 - DNA, 274 bp, Glycine max
  Clone ID: 701070320H1
tttaaaattaataatcttccatcaacgttgaatcatatgaaccgtcaacgactattataaaattcaaattttaattataaaattaaaattttaacctaatgactcttaaaagttgaagtgaagtttacttttatatatacaatgaatattctttggttacgggatagaattcatcaaatatccccaaaatcaaagtgtaatgtcacaacccactagtattcaccattatggtaaagtcataagctaacactgctggaaaatacagttaaaaact

SEQ ID NO: 15621 - DNA, 273 bp, Glycine max
  Clone ID: 701070321H1
ccaaaatagatcagttggcagtatgaagaatttgcctcacttatccctatgaagtggcctatacgtaaatcactaattgatttgatcatgtctcaatggaccttattgcttctctatgtacatgatggagttcacatttgtcacttaatgaggcacatcctaagcattcaacctttcagatcggctgcatgctactaagcagcacttgtgtattcctgaatattgttattacgtactattttcctaacaaaagaactgtatgagtatgacctt

SEQ ID NO: 15622 - DNA, 228 bp, Glycine max
  Clone ID: 701070322H1
cttttctttctcgtgtcgccgtttaggggattgtggtgttaaggctatcatttcgaaacccttcccctttccttttcaatatcagtatcatgtggttggttggttggggttcatagagtgagtgaatggagtctgttatagaagcataaaaaaaacatgatgagctaccttcaataaaattaggacatctataattcgcctaataatactctttgctcttcggtttct

SEQ ID NO: 15623 - DNA, 272 bp, Glycine max
  Clone ID: 701070323H1
ccaagaaaaaagcgatcatagtttcacttcggccttatccagtttagggtttcggttctctaccctatctttcacgtatcgaaaccttaaatttacgatcaggtctgagcaatctggttggtagaacctttggtcttatgagtcaagttttatgtctgaattagacgatcaaattcctactgccttcgatccttttgctgatgcaaatgctgatgactcgggtgctgggtcaaaggagtatgtgcatattcgtgtacagcagcgaaatggta

SEQ ID NO: 15624 - DNA, 273 bp, Glycine max
  Clone ID: 701070324H1
cgtggtttcagtgagtgatcggtgttcacttgatccttcataagtcgtcatcatcatcatcatcatcaccgttgattgaagaagatgccgatcagaaacatcgccatcggaaggcctgaagaggctactcaccccgacagttgaaggcggggttggctgagttcatctccaccttgatcttcgtgttcgccggttcaggttccggcatcgcctacaacaagctcaccgacaacggcgccgccactcccgacggcctcatctccgcttccatcg

SEQ ID NO: 15625 - DNA, 270 bp, Glycine max
  Clone ID: 701070325H1
cagaaaaaagatgagcgacggaggaaaacgacaaggtggaagagcgttgccgccgccgccaagaggccctccgcctcctcccccctctcgccctcgcctcgaacccgtcgatcgcgaaaagacatgtccgttactgtgcgagtgttcactaagattgggagtcaccattccatggaagactttgccgtcagaggcaaagagcccaaagacgaggttcagatttacacctggaaggacgctactctccgagaactcaccgatcttgtcaaa

SEQ ID NO: 15626 - DNA, 280 bp, Glycine max
  Clone ID: 701070326H1
caagaatgtccatcattcacaccttcacttattgcttcatgacaatgtcatccctttatgctgttgtcttcatcctctatggcattgtacctcaagtgtgcctcctcaaaggaatcactgtgtttccaaaggccacggacccttggtttcagtgtttgcatttgtgtatgtatctactcaaattcaacatttgattgaggttctatctggggatggctctgtggctatgtggtgggatgaacaaagaatttggattctgaagtcagttaccagcatattt

SEQ ID NO: 15627 - DNA, 269 bp, Glycine max
  Clone ID: 701070327H1
caaaaaaatgacagatgggaatcatggcaaaaaggataaggaagagaaagtattagagcacgaacagttgcagtaattttagtagctccatccaagaattcactaatcgattgtttcaaagaggttgatgacaaccaatcaaagatagtttgagttctactagaataaggtaaggagtggaggcaaaggcaaataaggaagataacagatcgagtttttgacaaagtaaagaatcaaatggaaactgataagttgaattttgaagatct

SEQ ID NO: 15628 - DNA, 268 bp, Glycine max
  Clone ID: 701070328H1
cgagtttgttgtgagctataagctagtttatcgtgaggagaatatgaagttgtttgttttctttgttgctgcagtagttttggtagcatggccatgccatggcgcaggctaccaaaggttccctctccgaatgacactggctatggtgagcgttcttcggaggtaaaatgcgcaagttttaggcttgctgtggaagcacacaacatccgagcctttaaaaccattcctgaagagtgcgttgaaccaacaaaggactacattaatggcg

SEQ ID NO: 15629 - DNA, 269 bp, Glycine max
  Clone ID: 701070329H1
gttcggtggagggagggagccgtagcagcggaagctctagcttgggtagcgaatcacaatggcgagaggattaaagaagcatctgaagaggcttaatgccccaaagcattggatgcttgacaaactgggtggtgcattgctcctaagccctcatctggaccacacaaatcgagggactgcctgccactcatactcattttgcgaaaccggctgaagtatgctctaacataccgtgaagtcattgctattctgatgcagcgacatgtcct

SEQ ID NO: 15630 - DNA, 271 bp, Glycine max
  Clone ID: 701070330H1
caagttcaaagatgaagatgatccacgttcttttcctctttgctcttgtctcgttcacttcccatgcttctgtcaatgatttctgtgtagcagacctaaaaggtccagatagaccttcaggctatcagtgctagccactaacactgtcacagtggatgactttgtgttctctggctttgtagctggaaacaccacaaacactttcaatgctgcattaacctccgcatttgtcactgattttctaggtgtgaatggtcttggtgtatctgtg

SEQ ID NO: 15631 - DNA, 273 bp, Glycine max
  Clone ID: 701070331H1
gcaatggactcgtaagactagtaactaagaaaataaaggtttctaatttatttcgttcaattctccggcggcaccgcaaccgattccgccaccgcatatggcaaaaggtcgaaaactaacgaccagccggagcgagcgctcttgggaacctatgcttacagccaaggctccgccgccgtgaacccgtcggagcttcgggaagaggatgtatggggcgccggagatgacgccggcgaacgcgagtgggatccacacttcgccgccatgagcaac

SEQ ID NO: 15632 - DNA, 276 bp, Glycine max
  Clone ID: 701070332H1
cgagataactagaaacagtgtgatgaaaatgaaggtccttgttttcttcgttgctacaattttggtagcatggcaatgccatgcgtacgatatgttccctctccgaatgaacactggctatggtgcccgtactccggaggtgaatgcgcaagttggaggcttgctgtggaagcacacaacatctttggctttgagaccattcctgaagagtgcgttgaagcaacaaaggaatacatccatggcgaacaatatagatcagactccaaaacagttaac

SEQ ID NO: 15633 - DNA, 276 bp, Glycine max
  Clone ID: 701070334H1
caagtttcgtttccaggtttcggcgcaatcggcttctgcttcaaggaaggagagcttgttattctctatcaacaagtataatgtcaggtgaagagggtgtcattgcagttgagccagctgctgctgctgctgccatcgcagcgagccaatggatatcatgactgccttacaacttgtgctcagaaaatctctggcttatggtggtttgtcgcgtggccttcatgaaggtgcaatagtgattcagaagcgtgctgcacaactctgtgttcttgcaga

SEQ ID NO: 15634 - DNA, 272 bp, Glycine max
  Clone ID: 701070335H1
ctttgcacaaaccctaacacctaaaagccagaagaagcgaaatcgtaatcgcaatctagcggatatgaaggtcgtcgctgcatacttgctcgcagtgttgggagggaatccatctccttctgccgatgatatcaaaaactcctcggcgcagttggagctgaggctgagcatgagttgatcgagttgctcttgaccgaagtcaagggcaaagacttcaatgagctacttgctagtggaagtgaaaagatctctgcagtggctggtggtggtgc

SEQ ID NO: 15635 - DNA, 273 bp, Glycine max
  Clone ID: 701070336H1
gttcgttgttgtcgttggaagccaaaaccctagcagccggcgagactggcagacgttgaggttgatgtggcggcggcggcggcggcggcggctgcagggcagccaaagaagagaacgttcaagaagttcagcttcagggggtggatctggacgcgcttctggacatgtccactgacgaactcgtgaagatgttcagtgctcgcgcacgcagaaggttccagagaggtctcaccagaaagcccatggccttgattaaaaagctccgcaaagcga

SEQ ID NO: 15636 - DNA, 270 bp, Glycine max
  Clone ID: 701070337H1
cgagtgtttattattcgtaatatatagtcactcaagcttctaggatttctgccagctacatgaaaatgggaagcaacttgaggtttttgagtctttgcctcttggcattgattgcatcaactcatgcccaacttcagttggtttttatgcccagagctgcccaaaagctgagaaaatcattttgaaatttgttcatgagcatatccacaatgctccatcactagcagctgcattgataagaatgcatttccatgattgtcttgtaagggg

SEQ ID NO: 15637 - DNA, 266 bp, Glycine max
  Clone ID: 701070338H1
ctgagtcttgtctatttgatattaacaagtagcaaagatgtttggcatcatcggaggaaacaagggtcacaagataaaggggaacttggtgattatgcgaaagaatgtgttggatatcaacagcattaccagtgccagggtgtcatcggaaccggcattaacatcattggaggagtcgtcgacaccgttactgctttggcgtcccacatctccatccagctcattagtgccaccaaggctgatggacatgggaaaggaaaagttgg

SEQ ID NO: 15638 - DNA, 271 bp, Glycine max
  Clone ID: 701070339H1
gttcgctactccatttgccgcctctggaactccgaacgttgaacatggacgctgccaaagaagaatttctcagagactttggtgaacactacggctaccctaacggccccaagtccgttgatcaaattcgagctcctaattcaagagattacaattacaagatcttgtatacttggatcatgctggggcaactctatactctgacctgcaaatcgaatctgttttcaatgatctcactactaacctatacgcaaatcctcacagccacagt

SEQ ID NO: 15639 - DNA, 270 bp, Glycine max
  Clone ID: 701070340H1
gcgaagtcgtaggagggtttcaaaagatggagaacatgcagagcttctggcaattgggcgatgaactccgtggacactcaaaagcatcggaggatcacaaatggttaatggttgcttcgaaattggcggaacagacagattgaagggggagcgtgtgaacaaccttgatctttcaaagggccccattgaaacaaggtcaagggataaatttgggttccaggaagagaacaaatttgattctcttaacttaagcatgttgaacctggactc

SEQ ID NO: 15640 - DNA, 265 bp, Glycine max
  Clone ID: 701070341H1
cttctccttctctctctctttttcgcctcattccattttcatctatcaatggctccagtagcagcagcatcttcagattcaatcaagccaagagatgtttgcatcgttggtgttgcacgtacaccaatgggtggattcttggtactctgtcatctctatctgccaccaagctaggctctatagctattgaagctgctcttaaaagggccaatgttgatccatcccttgtggaagaagtattttttgggaatgttcttagtgctaa

SEQ ID NO: 15641 - DNA, 266 bp, Glycine max
  Clone ID: 701070342H1
ccttaatttgccaccctaacctactgcattattattctcttccccttaatttctatctccaatccctcagcaaaacgcagcaaatgggtcggcttaatctcctacttgtgtggtcactctcattaacactgtcctttattatctacacccaatctctgctcagctcagtccaaaccactatgctaaaacatgccccaatcttgaaagcatcgttagacaggccgttaccaagaagttccaacaaacctttgtcaccgtcccagcca

SEQ ID NO: 15642 - DNA, 265 bp, Glycine max
  Clone ID: 701070343H1
cgacgattcgccttgctcgtcaaactgagcgctctcgtagatctgcacacctggagatggagcttatctctaaattaagacacccattcattgtggagtacaaagattcatgggtagaaaagggttgttatgctgcatcattataggttattgtgagggaggagatatggcggaagctataaagaaagctaatggtgtcctgtttcctgaggagaaactttgtaagtggctcgttcaacttcttatggctcttgactacttgcac

SEQ ID NO: 15643 - DNA, 266 bp, Glycine max
  Clone ID: 701070344H1
caaaaggcttcctgcaccgagcacaccaacttgatacctctgattctttctttgcttagaattccacagaatatggagatctttcttttcaatcactccccacctttggaattcaagggtttgagcaaggaggagaagactcattgctagggcaagtggaaatatggaggtacatgacatgcttcacggactccgtggccttgaaagctgtcatagagcttcgtatagcggacatactagaccgttatggtaaaccactatccttg

SEQ ID NO: 15644 - DNA, 260 bp, Glycine max
  unsure at all n locations
  Clone ID: 701070345H1
acacactctctctgggtgttgttgagttttgaaaatggtgtcgtcgcaggttgtgaatacttacccgttgtccagctacacgttcggcacgaaggagcccaagatggagaaggatacctccgtcgcggatcgtccgctcgcatgaaagtcaactatatgaaggagggaatgaggaccagtgtggaaggaattttactggtacaagagcacaatcatcctcatatacttcttctccanattggaaacacattctgcaaact

SEQ ID NO: 15645 - DNA, 268 bp, Glycine max
  Clone ID: 701070346H1
gtttcaccgcacgaatatcttgttgtttggagcgatccgagaaaaactctgtaaacatgttggtttaccaggacctccttacaggtgatgagcttctctctgactccttccgttacaaggaaattgagaatggaagctgtgggaagttgaggggaagtgggttgttaaaggagcagttgatgtagacattggtgcaaacccttctgctgagggtggaggagaagatgagggagttgatgatgcagctgttaaggttgttgacattgtt

SEQ ID NO: 15646 - DNA, 269 bp, Glycine max
  Clone ID: 701070347H1
cattgggggtggtatgcacaagtttctcatgtcacttgaatccggccatagtagctgtccacaatgttttctcgcagatcaagtggaagagtggctagtggtagagttgcattagaaaatggagtcccattaccacgttgcctgatcctaaagcaaatttacaatgggatgaggttaaaccactttcaggaaaaccatactggcatagtgttctttcgcctacaaatcttcaaccccgttataacttgatgccggggatgaacttgcgg

SEQ ID NO: 15647 - DNA, 263 bp, Glycine max
  Clone ID: 701070349H1
ccaagagacgggggaaatctcttcttcaatggcggcagagtcatctcgcagtagcgctaaacgcccctttatggaagaagacgacaatgaattctccaaaaagccaccagacaaaagggttaggtttccaaagggaaaacagtgaagccaggcgatgaagtggtcgtggacaaagcaaatgttgaggagggtgaagttgacttggtgaatgctaaaactgccaccaatggtgcaaaagatcgggaagaactcagaaggtttct

SEQ ID NO: 15648 - DNA, 272 bp, Glycine max
  Clone ID: 701070350H1
gcagtttcttcgattctctctttctctttcttcataaaaattaaacccattcaaagaaagatagaaagagcgatcatttccaatcacaatggcagatcaactcaccgatgaacagatctcggagttcaaggaagcctcagtttgttcgataaggatggcgatggttgcatcacaacaaaggagcttgggactgttatgcgttcggtgggtcagaatccaacagaggctgagctccaagacatgatcaatgaagtagatgctgatgggaatgg

SEQ ID NO: 15649 - DNA, 272 bp, Glycine max
  Clone ID: 701070351H1
cattgcaagactggcacttcgttgcttggtgatgtccctttctgttctcttcactcttggtcttgcgagagaaagccatgccagagacgaagatttttggcatgctgtttggccaaacactcccattccaagttcttgcgagatcttctaaagcctggccctgcaagtgttgacatcgagcgatcaccctatgcaaattgaagaaacacagtacccgaaaaccttcttctataaagaagaccttcatccaggcaaaacaatgacagtacaat

SEQ ID NO: 15650 - DNA, 267 bp, Glycine max
  Clone ID: 701070353H1
gttttaaagttgaggctaattcagcgccacaaacatttgaataatagaaatatcttatcatcatttcttctgatttgcttccaagttccaatccatggagtccatgacggtgattaaatcaaccttcccaatttcatgaccaataacgccccattttccctctccacaagacctcttagacccatcctgaaggtttccgtgaaacccccacctccagatttcgattacaggcgagagatatcggaggagtcaagagccgccatagcc

SEQ ID NO: 15651 - DNA, 267 bp, Glycine max
  Clone ID: 701070354H1
ctcgaatttcgatactttgatcagatccacaacactccttcatccatgacgcttggctcttcaggatccagtgtcgtggttccaaggaacttcagattgctggaggagcttgagaagggagaaaaaggaatcggaatggaacagttagctatggaatggatgatggtgacgacatttacatgcgctcttggactggaaccattattggcccctataatactgtacatgaaggaagaatttatcaattgaagttgttttgtgataaag

SEQ ID NO: 15652 - DNA, 264 bp, Glycine max
  Clone ID: 701070355H1
ctcaccaaagtattcaagaattcatagtacctgaaacattgcctgaagaagtccttgctaagttgggagcacctccaaagagtgatgttccaattattactcccaatgagcttcctgaggctgatggctttttgttggttttcccacaagatttggatctatggccgctcaatttaaagcattttttgatgcaactggaggcctttggcgtacacaggcactagcaggaaaggccgcaggttcttctatagcactagttctcaa

SEQ ID NO: 15653 - DNA, 267 bp, Glycine max
  Clone ID: 701070356H1
gggtaaaagggtattagatccttgaaccagatcaaatcatcaaaatctctgtctatggggttgtgaaaacaacaatcacattgttgttgctgtaaaaggggattccttagtctagatttgtttgcattgcagaaaaccagataccccattattgttcttatctatctatctgtctatattctatttatcttcttattgtagttctcattgtgtctgatttcagtgatttgtgttgtttttggttaacacaagcaatggaggttgttg

SEQ ID NO: 15654 - DNA, 264 bp, Glycine max
  Clone ID: 701070357H1
ctccttttagcaagttaacaacacttttgtcttcgttccattatctagttctcaattctcttcaccctttgcctctgaaagaaatgggtagtcttgaagcggaaagaacaacagtaggattggcagcaagaacccttcagggattctctccccatacacctacaatctaagaaacacaggccctgatgatgtttacattaaagttcactactgtggaatttgccattctgatctccaccagattaaaaatgatcttggcatgtc

SEQ ID NO: 15655 - DNA, 262 bp, Glycine max
  Clone ID: 701070358H1
cgcaattaaagctcttagtttggtcttagttagattgctcggttgtctttcatatatgtgttaatccatttaaatgtctcactaatcgcttagggaagatttatctgcaggtagcctgttgcaacatttaggatgttgaaaggaaagtgtctcagtaattttgccccttcatgtttcatttaagtcggtgttggacagatgaactcatgttggatagaatttattaaacttttgttttttcccctgtaatggatgactagtg

SEQ ID NO: 15656 - DNA, 264 bp, Glycine max
  Clone ID: 701070359H1
cttaacaaagcgccccacgttctgagacaaacccagtatgctgtctgccatggaggatgagaaagtttcgatttttcattgattgggtataactgcacaaagaggttagtgaagcaatgcatagagcgatctgtttctcattcacccacgattcctcctcctcttccttgtcctctcaattttcctcattttcacatgttctggttctactactaccagtggttttgctacacctcaacagggtgttgagatcattgaggagaa

SEQ ID NO: 15657 - DNA, 263 bp, Glycine max
  Clone ID: 701070360H1
gtttttgttttgttagggttttcgattcgatattcgttgttccaatgagcgatcacttggtggtgttcgttgaccgtctcgcgcgccctgtccccgttgatccggtggcgcagacggcgcaggtgccttccaaccatctccacctccggccgccgtggatgccgacgccgccgggagctccggcacctcaccgtcggaggattgcgacggcgagggcggcgacgaggaggagccgctgatccagctggcagagtgccgcatct

SEQ ID NO: 15658 - DNA, 265 bp, Glycine max
  unsure at all n locations
  Clone ID: 701070361H1
cagaaacagtgtgatgaaaatgaaggtccttgtcttcttcgttgctacaattttcgtagcatggcaatgccatgcgtacgatatgttccctctccgaatgaacactggctatggtgcccgtactccggagggaaatgcgcaagtcggaggcttgctgtggcagcacacaacatctttggctttgagaccattcctgaagagtgcgttgaagcaacaaaggaatacatccatggcgaacaatatagatcagactccanaacagtta

SEQ ID NO: 15659 - DNA, 265 bp, Glycine max
  Clone ID: 701070362H1
attcattttagcatcaaggttgaatctcagagaaaaagaaacatcgacaagcatgtctggaagaggaaagggaggcaagggtctcggaaagggaggagccaaacgacaccgtaaggttctgagggataacattagggaatcaccaagcccgcgattcgccgtctggccagacgtggtggcgtcaagcgtatcagtggtcttatctatgaagaaactcgcggtgttctcaagatctttctagagaacgtcattcgcgacgctgtca

SEQ ID NO: 15660 - DNA, 264 bp, Glycine max
  Clone ID: 701070363H1
ccacccagccgcagcagcaagtgatcgaagcgaaaagagagtaatcagcagagaaattcatcgtcgtagttatgggtaaagttcacggatcacttgcacgtgccggtaaggttagaggccaaaccccaaaagtggcaagcaggataagaagaagaagccacgtggccgcgctcacaagaggatgcagtatcatcgccgattcgtcaccgccgtggtgggattcggcaagaagaggggacctaactcgtctgagaagtgaggctg

SEQ ID NO: 15661 - DNA, 271 bp, Glycine max
  Clone ID: 701070364H1
caaaaagttctgttctttttcccacccaattcagttttctcaaatggctcgtacgaagcaaacggctcgcaagtccaccggcggcaaggcgccacgtaagcagctggccaccaaggcggctcgtaagtctgctccggcaccggcggcgtgaagaagccgcacagattccgtccgggaaccgtagcgctccgcgagatccggaagtaccagaagagcacggaacttctgatccggaagctcccgttccagcgattggtccgtgagatcgcgc

SEQ ID NO: 15662 - DNA, 268 bp, Glycine max
  Clone ID: 701070366H1
cttgcgtttctccgttctcagaaggttttggtcagtgaagtcttctccttcaacaacaacaaggggttgcagttaaaatggatgaagctgaatttcaacgccttctccaactcttccccgttgttcgtactcgcattacactgcagaagcatcatcatccaaacaaattgcatctgggtcagcacagaatgaggtaaaggatcggcaagatgcatgggatgaaagggataaggattttgagaagcaaggaattaatcaacaagattca

SEQ ID NO: 15663 - DNA, 268 bp, Glycine max
  Clone ID: 701070367H1
ccaggatcaatcaattggctgaaaccaaaggctatgacatcaactatgttcttgatggtgagaagggccaaaagatcaagctagcagctatagtgcaggataagaaatcagggagagtgttggagttgttcacaatgctcctggtttgcagttctacactggtaactatgttaaggatttgaagggaaaaggtggatatgtgtaccaatctcattcaggactatgtttggagtctcaagccttccctgattcagtgaatcagcctaat

SEQ ID NO: 15664 - DNA, 267 bp, Glycine max
  Clone ID: 701070368H1
cctcattcgcttcaaatttcaggaaatcaattatggctcaaccctcaacaagaataggccttgctggactggctgttatgggccaaaatctagcactcaatattgctgagaaaggctttcccatttctgttttaaccgaaccacttccaaggttgatgagactgtagaacgagcaaaacaagaaggaaatcttccagtttatggctaccatgaccccgaagcttttgttcattccattcaaaagcctagggtgataataatgcttgt

SEQ ID NO: 15665 - DNA, 264 bp, Glycine max
  Clone ID: 701070369H1
cgcaagacaacacactctcatatataaaagagtgtctctgataatttgatctttgtctcttctcttactctcctttgagatttttcagcaccccaccaaggttttgtccgaaaaccttgaatttttcgcctacctttacaatgatctcttcattgagacaacctgttgtagggatcagtggttctgatcttcttttgaggcaaagacatgcaaccctaattaaggcaaggtcctttttaccctctatgtcaagagaaaagggtc

SEQ ID NO: 15666 - DNA, 266 bp, Glycine max
  Clone ID: 701070370H1
cggagttgccgttaaggatccatctgctccccatggagttcggcttttgattgaggactatccttatgcttctgatgggctagagatatgggatgccatcaagtcctgggtgcaagaatatgtgtcattctatacaagtcagatgcagcaattcaacaagaccccgaactccaagcttggtggaaagaactcggcaaagtgggtcatggtgatttgaaagataagccatggtggcaaaagatgcaaacttgtgaagagttgattga

SEQ ID NO: 15667 - DNA, 264 bp, Glycine max
  Clone ID: 701070371H1
ctagccaggctgttgtagtatagttagagatatcactactacaccaccctgcatagtttgttcagctataatactacttgagcttctttacctacttttcaaacctacattgcacacaaaatggcaacctctggtcatgttatctacttgcattgcttctttttatgtcaactattgtatcagagagtagagtggcaaggcaggacttgggcctggaccttggtgggttgggggttggacttggactgggtttgggcctgggga

SEQ ID NO: 15668 - DNA, 265 bp, Glycine max
  Clone ID: 701070372H1
gctgtctgctgttagatctgtacccgcctagccattgatttggaaaagtccaacttcaaggatgagtaagcttcagagtgatgctctaagagaagctatctcaggaatcatggctgattccaaggaaaagacaggaaatttgtggagaccattgaactccaaattgggttgaaaaattatgatccccagaaggacaagcgtttcagtggctctgttaagttgcctcatattcctcgccccaagatgaagatttgtatgcttggag

SEQ ID NO: 15669 - DNA, 263 bp, Glycine max
  Clone ID: 701070373H1
ctctctctttctctctttctagttcgtgttcttcgtcgcaaatcccaagtaggatctctcttgttttttctctaggtttttcgcgatggcgtcgaagcgaattttgaaggagcttaaggatttgcagaagatcctccaacatcttgcagtgccggtcctgttcatgaagatatgtttcattggcaagctagcattatgggtcctccagacagtccctatgctggagcgtgttttcctagtgactattcatttccctccagatt

SEQ ID NO: 15670 - DNA, 257 bp, Glycine max
  Clone ID: 701070374H1
catcgagataactagaaacagtgtgatgaaaatgaaggtccttgttttcttcgttgctacaattttcgtagcatggcaatgccatgcgtacgatatgttccctctccgaatgaacactggctatggtgccgtactccggaggtgaaatgcgcaagtcggaggcttgctgtggaagcacacaacacctttggctttgagaccattcctgaagactgcgttgaagcaacaaaggaatacatccatggcgaacaatatag

SEQ ID NO: 15671 - DNA, 260 bp, Glycine max
  Clone ID: 701070375H1
cataatctcctgagagtgtttggttgacagtagcaaagatgtttcctttcgggcaaaagggccaaaagataaaggggactatggtggttatgcagaagactgtgttggatatcaacagcatcaccagtgtggagggatcgttgaccaaggcttaggcttcataggcagtgcagtcgatgcacttacttttgcagccaccaaaatctccatccagttgattagtgctacctcggctgatggtgggaaaggaaaaattggaa

SEQ ID NO: 15672 - DNA, 258 bp, Glycine max
  Clone ID: 701070376H1
gtaaggtccgcagaaaacagaattctagtgaagagatggttagacttggacgtttgtggatgtctcttcttccatttggatttctcttgttctttagttcagctttcatcagagtacctggtgcccttgctggagcaaagagggtcatgtcatgacatgccaaattgcgcaggcacttttagagcctgaggcatcagaagccgtgtaccaattgttacctgactatgtcaaaggtaacttatcatccctatgcatatg

SEQ ID NO: 15673 - DNA, 266 bp, Glycine max
  Clone ID: 701070378H1
cgcaccggccaccggccatgacattcaagcgcaggaatggaggtcgcaacaaacacggccgtggccacgtcaaattcatccgatgctccaactgtggcaaatgctgccccaaggacaaggccatcaagaggttcttgtgaggcacattgttgaacaggctgcagtcagagatgtgcaggaagcctgtgtctatgaacagtacacgcttccgaaactctatgtgaagatgcagtactgtgtttcctgtgctatccactctcatgttg

SEQ ID NO: 15674 - DNA, 265 bp, Glycine max
  Clone ID: 701070379H1
cgcacttctgaggttaaagcaaaaaacaaagagagagagagagagacaatgatgaagccatcgatgctcagatctctccactccgccgccacccgcggcgcctctcatctcttccgccgtgggtacgcctccagccggtgccggagcgcaaggtagccgttctcggcgccgcggcgggatcgggcagcctctctcccttctcatgaagctcaatcccctcgtttcgagcctctccctttacgatatcgccggaactcccggcgtc

SEQ ID NO: 15675 - DNA, 269 bp, Glycine max
  Clone ID: 701070380H1
ccaacccaaactttgtgtgaagtagttcattccccattcctcactcgcttgtcttgaattttatttgttgcttcgtttcccactatgaaagaaggtaaatcagttaaactcaaccatcaacaaccgcaccagaaggtcacctctcgccttcaaaattcgccaaattgtttgatccagaagcatcctgggacaaggatcaattgggagacgtattgcattggattagacaagtgctcggccttgcgtgtggattcctttggggttccata

SEQ ID NO: 15676 - DNA, 263 bp, Glycine max
  Clone ID: 701070383H1
caaagagaatccgaggcgaagagaagagaaaaattaagatggaggggaaggagcaggatgtgtcgctgggagcgaacaagttcccggagagacagccgattgggacggcggcgcagagccaagacgacggcaggactaccaggagccggcgccggcgccactggttgacccgacggagtttacgtcatggtccttttacagagcagggatagcagagtttgtggccacttttctgtttctatacatcactgtcttaaccgtca

SEQ ID NO: 15677 - DNA, 262 bp, Glycine max
  Clone ID: 701070384H1
cgaagagagatggatccagacgcgttggcaaaggcattcgtggagcactactacagcaccttcgacaccaacaggaacggcttagcgaatctctaccaggagggttccatgctcactttcgaagggcagagatccaaggcgcttccaacatcgttgccaagctcacctccctcccttttcagcagtgccaccactcaatctccaccgtcgactgccagccctccggcgtcaacgccggcatgctcgtcttcgtcagcggaaa

SEQ ID NO: 15678 - DNA, 261 bp, Glycine max
  Clone ID: 701070385H1
ctctactgcttcaccttctgctctagaaaattcagtggtgatacatggcttcggctactctctctgtagccaaaccagcccttcaggcaaatgggaaaggcttctctgaattctctggcctccgcagctatcaggcttccttcccttttctagaaaatcttcagaggatttccattctgtcattgccttccagacctatgcagtcgcaagcagtggaggatacaagaacggtgtgacagaagcaaaactgaaggttgccat

SEQ ID NO: 15679 - DNA, 265 bp, Glycine max
  Clone ID: 701070386H1
caaccactcaaaatgtcctccatggcttcctccaccgctttcttcacacccctccatgatttcactcaagccagaacaaccccatcaccccctttgcctttcatcaaatcctcctttgcttcctccaagtaaccttttttcaccctgccctttccctacaaacctcttccaactttcccaggctttttggaaagcctaagtttttctctgttcatgcaagggctgccacagaaaaaaccatttatgattttactgtcaaggatat

SEQ ID NO: 15680 - DNA, 262 bp, Glycine max
  Clone ID: 701070387H1
caccttctgcatttgtgacatctactggaagattgaatggttcaagttcagtctcggaaacgtatgggaatccatgccttgcaaattctcaagactttgaagtgaaggaagtagagttatggggctttgatatgcttcaaaatatgaggcagtacttgcaatgagcaaaacagaagcacctgggatctgccgattctgaatatttacctgatgtgtgaatcaaatggcttgcagttggcatttcattgaatggtcacttttc

SEQ ID NO: 15681 - DNA, 264 bp, Glycine max
  Clone ID: 701070388H1
ccagagagagagagggagtcagagaaaccctaggtaagaagaaaagatgccggctggtcatggtttgagatcccgcaccagagattccttctctcgtcctttcaggaagaagggaaccatcgccctcacccatacctgagaacctaccacgtcggcgactatgttgacgtcaaggttaacggtgccgttcacaagggaatgccccacaaattctaccatggccgcaccggacgcgtctggaatgtcaccaaacgtgctgttggc

SEQ ID NO: 15682 - DNA, 260 bp, Glycine max
  Clone ID: 701070389H1
ccagaagaaggaaagaagaaaggcaggttctgctgtcactgcagagaatacagaacaagaatctgctcctatcccagaaactctaacaagaagcgtggaagagtttgaacagactgagaaaacagctaggtaacacaaaagccacagaaaacatctcaattcacgaggcagaccaaggtaaaatctgtacccgcagctcttcgcaaccggggtacgcggcgaattcaaccatgggtatgtgtcctaattgcgcttgtcgt

SEQ ID NO: 15683 - DNA, 257 bp, Glycine max
  Clone ID: 701070390H1
cacaggcaaaccagatccaaccctagatcctaagtatgttaacttcttgcaaaggaagtgtagatgggcctcagagtatgtggatcttgatgctacaacaccaaagacctttgacaatgtttactaattaatctcgaaaagaaaatggggttgttatctactgatcagttgttatactctgatgcaaggacttctccccttgtttctgcattggctgcctcgcactcagtttttgagcaccagtttgctgtgtcaat

SEQ ID NO: 15684 - DNA, 257 bp, Glycine max
  Clone ID: 701070391H1
cttcgttcgtatcgaagaagaagaagatggggaaacagattgtgccggtgaaatcagtgatctacgcgctctcccctttccagcagaagataatgccgggtctctggaaggacttgcccacaaagatcaccacaaggtctccgagaattggatcagcgccactctcttgcttggtcccctcgtcggaacctacacgtatgttcagaactacctggaaaaggagaagctgtctcacaggtactgaactcatgcaagag

SEQ ID NO: 15685 - DNA, 258 bp, Glycine max
  Clone ID: 701070392H1
cgaaaaagaggattggagggtcgccacgtttagcaacaaccaaaccctctctactctttcttcttctcttcgctagggttttagcttcttcctcttcacttcgttcttctggcctctacaatgagcacgacaaggacaccttcaacgtcgctgatctcacttccgctctcaacgaggacaatagagcagaccttgtcaatgctctcaagagcaagatacagagtttggctggacagcattctgatattctagagtctc

SEQ ID NO: 15686 - DNA, 261 bp, Glycine max
  Clone ID: 701070393H1
ctgcctttggcattttttcgccaatccctgaggagaactgaaaaaagcagaaagtatggcttcgacggcagcgtacctggctcggcgcgcggcgcagaaggagagggttcggatcctctaccgccgtccctcaaagacactctcaactgggccgtacatcgccacctcttctacgacgacgcttcaaacctccgcgaaaggttcgaggagaacagacacgtggaagaccctgataccattgacaggctcatagcggatgct

SEQ ID NO: 15687 - DNA, 262 bp, Glycine max
  Clone ID: 701070394H1
ctttgcaaaagacggtagggataacagctggaatttgtgtgttgatccaaaacaaatcagagaagaagggagatatgtatgacgcaatctacagcttctactttggggactatggtcacatttcagtgcgggttcatacctgacctatgaagacacttatcttgctgtgactggtggatctggcatctttgaaggggcttatggtcaagtcaagctgcatcaaattgtgttcccctttaaattattctacacattttatctt

SEQ ID NO: 15688 - DNA, 268 bp, Glycine max
  Clone ID: 701070396H1
cgggtttctctcgctaaccaagaaggaactagggttttacagaatacaagctctctctctctctcgtcggttttcgtcaatcaaatccaatccaatatcaaatatgagtcgtcatcccgaggttaagtgggctagaggcttgacaaggtctatatcacggtgcaattggctgattcaaaaaatgccaaagtggatcttacgccagatggtatttttaccttctccggtagtgctggtgctgaagacatcagtatgagctaaactggag

SEQ ID NO: 15689 - DNA, 197 bp, Glycine max
  Clone ID: 701070401H1
acaggaagctgacatttggtcgtttggatgtttacttttggagatgctgactctggaaattccatattctggactttcagattcacaattccttgatagtctgcagatggggaaacggacagattaaattgttgagctgaaagaattgagtccattgaatgaacccaccatgattgcatctggtgaagacctggaaa

SEQ ID NO: 15690 - DNA, 268 bp, Glycine max
  Clone ID: 701070403H1
tgaaatgaggcttgtgagtgacaaaacaaatggcagagtggcatcgtttagcattatgtccttggctatgtgcattgcagtctctggtttgcaattgtgggcattgaagcggtacttccagaagagaaaccttaattggataggttatttaaattggatagtgatactgcaaccttttattaccttaaaaggaatttccaggaaccatcattaccaggggtggccagaaatggtggttaccccaaaacacaaacaagtacaaccaaaa

SEQ ID NO: 15691 - DNA, 268 bp, Glycine max
  Clone ID: 701070404H1
gacatcgagcgaatcggctcgagggctcgaggcaatctgtgctctaagtaattttactgtaaagaccatgcgctgctaaacatgttgagagactttatatcatacctagggcagcctttttctggggttttaaggaaccctcggttccatggcttggtggccttcccaggccagctgtaagttgaatcatccaatcatccggtttgaccttaagccatgtgtcctaaattatggtcattaatttattttatgaatatttttttttgtt

SEQ ID NO: 15692 - DNA, 277 bp, Glycine max
  Clone ID: 701070405H1
aaaatcctcacccattttcttcgtagccaaacactctgaaattctcagttatgtcgtggcaagcgtatgtggatgatcacctactgtgtgaaatcgaaagtaaacaactcaatcacgccgcaacctcgggccagaacggaaccgtttgggtccagaccaccaatttccctcagtccaaacctgaggaaataactgccatcaataatgactttaatgagcctggatcacttgctccaactggattgtatatcggtggcaccaaatacatggtcatcca

SEQ ID NO: 15693 - DNA, 274 bp, Glycine max
  Clone ID: 701070406H1
aaaaggaggagcaggaggcatcaccgttaccaaacatggtgaaagggcgccaaggagagcgtgttagactttacgtccagggttcatacttggatacaagggttcaagtcaattcaataccaaacacttcattaatccagattgagaatgtaaacactaaggaagaagttgcgtggtactgtgggaagcgtatggcttacatttacaaagccaaggtaaagaaggacggaagccactatcgctgcatttggggtaaggtcaccaggcctcatgg

SEQ ID NO: 15694 - DNA, 275 bp, Glycine max
  Clone ID: 701070407H1
ctcaagggaaaccttctttacgccatcgagagagttctgaagctttctgttccaaatttatatgtgtggctctgcatgttctattgctttttccacctttggttaaatataatggccgacttctcggatttggtgatcgtgaatcctaccaggattggtggaatgccaaaactgttgaagattattggaggatgtggaatatgcctgttcacaaatggatgatccgccacctatattttccatgtttaaggcacggtataccaaaggccgttgct

SEQ ID NO: 15695 - DNA, 274 bp, Glycine max
  Clone ID: 701070408H1
caatgagacaaacactggaccttggtgattcagggcttttacccttagagataaggttcttgcatgatcctgctaaagatacagggtttgtcgggaatggcattgacaagtaacatgatagattttttaagacccaagatgaatcatggagccatgaggttgccatatcagtgaaaccactgaaagtgcaaaactggattcttcctgaaatgcctgggcttataactgattttttgatttctcttgatgatcggtttctgtactttgtaaactg

SEQ ID NO: 15696 - DNA, 272 bp, Glycine max
  Clone ID: 701070409H1
gaagaagctatgcctgatgagtgagtcatttttttctctctggtgggtcccatcctcttctgctctgagaacctttataagtgttataagagtccatgaggagtgaacccaaggaaaaagaaggaaaagaaaaacttcacttcacttgcatgccaaatgagaacaacctcttcttagaataatttcctcggtgtttaagccttgtcgatttccgaacaccaatccgagttaattaaacaatgagagtttcgacagacaagttagagacagag

SEQ ID NO: 15697 - DNA, 184 bp, Glycine max
  Clone ID: 701070410H1
acttcaccttagtttccgattccaaccttcagatgaatgcgcgcttcatcggacacaggcctgaaggaagaagccgtgactacacatggatccaaagccttggaattctcttcaaattcaaaactttttcatttaaggcaaccaagacaccccaatggaatgatgaacttgaccacttcaaatt

SEQ ID NO: 15698 - DNA, 93 bp, Glycine max
  unsure at all n locations
  Clone ID: 701070411H1
gtgcgagctgatggggcattcatcccatttgcagaagattgcaatatgaacagtngaaggaganatgtaaaaggtgtaggggagaacagtgat

SEQ ID NO: 15699 - DNA, 247 bp, Glycine max
  Clone ID: 701070412H1
tgcaaaaccattctctgaagatgacctccacaccattattcagatgggatttggccaaaatgcaaataggataacaccaatacaatctcagagtttcaacggctcaaatcaagtaaccctataaaatcaagctctgatcaccattcattacggctgaattgaagcttggaggaataggaagactactgctgtacaccaccagaagggatttaatttgaacgagcccttggattattaaggcattggt

SEQ ID NO: 15700 - DNA, 182 bp, Glycine max
  Clone ID: 701070413H1
ggcgactattactcttggggacaagcgaattggactcaagactagtgttctagaggaaaaagctacagcatgtaacatgctttgttgctatgctgatgagctgcaggaaggattctttccaggattgatcaggctgctggaactttagttccactccttaaattttatttccacgaggcggt

SEQ ID NO: 15701 - DNA, 276 bp, Glycine max
  Clone ID: 701070414H1
cttggttctgcttcttctcgggcttctacttctgttatgcctgctgtcatcagcaccaatccagccagttctcagcaacaaatgcagcgaaatcagcagcagcagcaaattcttcagcatcaaagcagaatccatttgcagctgcagctgccgccgctgctcgcaacaagaccccatcaaccagcaatggcagtgtttactctgataacctcccctctacatcttcaatggctaataagtttcccagtgccgtatccgcatttcctcaaagccctg

SEQ ID NO: 15702 - DNA, 265 bp, Glycine max
  Clone ID: 701070415H1
cgcatgcttttaatttcctagatctcccaaacaaattgtagcataagtcccatggccaaagagactagtgttgtttatctatatcccagcaaatcccaagtttggggtgagaattttgatcataaaaacttgtaataacaacactagctgctaatgggaagacggaggagagttatggagcacctaatggcacatatcctgcgtttcccgggtggtatgccgatgtttcccggccaaggggagcgcacaccttttaaattggaaa

SEQ ID NO: 15703 - DNA, 280 bp, Glycine max
  unsure at all n locations
  Clone ID: 701070416H1
tcangggcagtagccgagattccgtgagttgcaaaaatgaagacgattctttccaccgagaccatgaacaacccggacggcgtgagcatcaaagttcatgccaaggtcatcgaagttgagggccccggggaaaattggtgcgagaattccagcatttgaatctcgaatttcaggtcaataattgcggaaaacggtaaaggaaagctgaaaatcgacgcgtggtttggttctcggaaaacatcggcggccattggcaccgccttgagccacgtggagaatc

SEQ ID NO: 15704 - DNA, 152 bp, Glycine max
  Clone ID: 701070417H1
tgctgctctgacgaagatggtggttgcaatgatgcttatatttcttctaatttctacgcaaatggagagcgttgagcccgatgctgcagattgcttggctggttgcactactgcctgtgttcaagcgactcgagggctccagcacggtgtga

SEQ ID NO: 15705 - DNA, 275 bp, Glycine max
  Clone ID: 701070418H1
aagttacttgcaacaattgcgccaaatatgcccgaatggtggacccaacaaccttgtgaattttgcacctgtcactcctgataaaattgacagggtctacttcttcaatcttcaggtcagaagggcttgcttcagagtgaaccagaagtggtctcgaaaaccggttgcggtaccaatccccatgtccataaggtccagcagtgaccaaaatgccacctttgatgcctttgaggcttcaatgattaagatgggtaccattggtgtgctcactggga

SEQ ID NO: 15706 - DNA, 122 bp, Glycine max
  Clone ID: 701070419H1
gaagacaccaatcttctctccacgcccttcttgggtaaccgtctgaagtgcagcaatggcagatggattgcattcgcagcatccatcggtagttcagaagttatctggacagtcctatctgt

SEQ ID NO: 15707 - DNA, 273 bp, Glycine max
  Clone ID: 701070420H1
acacaacacaacacaacacagagagtagtgagtttgtgacaaatcctctgtcgttatctcaacctctctcaaaactttggtctggttctgtaactcattccatttttgtgtgttttgcattggattattatctgtccacttcccaggttcaactaacaaaaactcttcctttgaatttggatcggcttaatcctgcttacaatccggtcctttggtcaatccggtcctccggactgaagtgttggttgaactggatcctttcttcatccattt

SEQ ID NO: 15708 - DNA, 97 bp, Glycine max
  Clone ID: 701070421H1
ctttctcttttttagcttttcttttcctctaaacgtgagtccttccttcttcgatcacttgttaaattcacatatcatagcaatggcagcacgttcc

SEQ ID NO: 15709 - DNA, 275 bp, Glycine max
  Clone ID: 701070422H1
tcattcacacattcacagttatactctctctctctttgtcgcttggatcactgatctcatctcaattttcagatatgtcgacatctgataaagccaaaagtggtggaaaggggtagcaagatgaaaaacacaaggaagatgatcaagaggaggggaagggtggattcattgagaaggtgaaggatttcattcatgacattggtgagaagattgaggaagctattgggtttgggaagccaactgctgacgttactgcgattcacattccatcgatt

SEQ ID NO: 15710 - DNA, 91 bp, Glycine max
  Clone ID: 701070424H1
acattcccttctccaacatgccaaacgacagcgttctgagtcttttcttcttcgttaccctcttcacatgccttctctctgctaattccca

SEQ ID NO: 15711 - DNA, 250 bp, Glycine max
  Clone ID: 701070425H1
gttgatcgagataactagaaacagtgtgatgaaaatgaaggtccttgttttcttcgttgctacaattttggtagcatggcaatgccatgcgtacgataatgttcctctccgaatgacattggtaatggtgccggaattcgggaggtgaaatccgcaagttggaggcttgctgtggaagcacacaacatctttggctttgagaccattcctgaagagtgcgttgaagcaacaaaggattacatccatggcg

SEQ ID NO: 15712 - DNA, 271 bp, Glycine max
  Clone ID: 701070426H1
atctttgtcaacaattgagaacatttggcttaaggggaatggacagtacttgcttggtggcttgcggccatccatagcagatctcagtctggtttgtgaaattatgccattagagctttagattgagaaggacgggaacggaatcctgggccctcacaagaaggtccagcagtggattgagagcacaagaaatgcaacgaggcctcattttgatgaagttcatacaatcctctataagctcaaaacgaggctttctgagcagcaatctaat

SEQ ID NO: 15713 - DNA, 233 bp, Glycine max
  Clone ID: 701070427H1
gctgataaaaaatttgaagtgtgaattggaatgtatggtgtagatctggagaggtcgataaaccccaatttgtttgcttagtcggcaatgaggattctgcaacttgatcccagttatacctcacggatgaagacaaccaagcattgctttccctgcacgacactttccagaagtgtgtgagtgccaatgggccttggcttaaaggcaaccaggggcccagattatggccaaac

SEQ ID NO: 15714 - DNA, 193 bp, Glycine max
  Clone ID: 701070428H1
ttgctccagtgtcaaagacaggataggatatagcatgattgtagacgctgaggagaaaggactcatcacaccgggtgaaagtgtcctcattgaacctaccagtggaaacactggcatagtttggcattcatggcagctgctaagggttataaacttattataaccatgccttcttcgatgagtcttgaaagaa

SEQ ID NO: 15715 - DNA, 268 bp, Glycine max
  Clone ID: 701070429H1
caagtgagagaggttgaaggcggcgtgagaatgttggacatcaacctattcagagaggagaagggccacaaccctgaactcatacgcgaatcccaacgccgtcgtttcgccagcgtcgaatcgtcgacgaggtcatcaatctcgacaaagaatggcgaaaacgtcaattcgagttggaaaatctccgcaaggcattcaaccaggtccaccagggagtctcccaactccagcgttcctgggaagatacctcctaggtccataccggatc

SEQ ID NO: 15716 - DNA, 99 bp, Glycine max
  Clone ID: 701070431H1
ctaaaacttgtggatatgatgattgacaggttaaaatgtttgccagacgatgaactctcttctcttgccactatagttgccacttatggtttgaacgct

SEQ ID NO: 15717 - DNA, 150 bp, Glycine max
  Clone ID: 701070432H1
tgtggcacacgtccgtcaagtatgtcatattgctttgagaagggatcatgaatttatcaatacagttcaagagggcacggaggagacacattcacaggtctgccagacgcctttagttgccccttgggacagcctttccccttaataaaa

SEQ ID NO: 15718 - DNA, 131 bp, Glycine max
  Clone ID: 701070433H1
ctttccacttgtctccgaattagttatcttgagaaacattattcccattgctatatattatggctagcatgaaggttacatgggtggttgtgatcatgtgcatggccgtggtgggtgaacgatgatggcgc

SEQ ID NO: 15719 - DNA, 114 bp, Glycine max
  Clone ID: 701070434H1
cgaacttctgcttcgcgccgacacctcttctttccagggaccatggcgaaaaacaggaacaacaagaagaagagcaacggtgtcgtttcaatggatactactgacgcattcgtt

SEQ ID NO: 15720 - DNA, 271 bp, Glycine max
  Clone ID: 701070435H1
agcgtggctccttctctgggaaggactaccaggaccctccaccagcaccactcattgatgctgaggagctcacaaagtggtccttttacagggcccttattgctgagttcattgccactttggtcttcctctaaaataatggtgtcacaagtattagggaacagccacaaacgggtccttgtgatgcgttttgttggggttggcatccttggcattgcatgggcctttggtggcatgatcttcatcctggtctactgcactgctgggattt

SEQ ID NO: 15721 - DNA, 270 bp, Glycine max
  Clone ID: 701070436H1
cgagcgaagagaatggctcccaagggtttaatctttttggctgtgttatgcttctcagcactgtcactgagtcgttgtcttgcggaagataatggactttgtatgaacttttacaagaatccatgccttcaggctgaagccttcatcaaagaccaagtcaagcttctctacaagggccacaggaacactgctttctcctggctcagaaacatcttccatgactgtgctgttcagagttgtgatgcttcactgttgctggactccacaaga

SEQ ID NO: 15722 - DNA, 264 bp, Glycine max
  Clone ID: 701070437H1
caaccatggccacctccaacttctctattgttctctccgtctccctagccttctttttggtgctacttaccaaggcacactcgaccgataccgtttctttcaccttcaaacaagtcaacccgtcccaaccaaacatatgcttccaaaaggtggctagaattccatcctctggggtgttacaactcaccaaagttggcagcaacggcgtgcccacctcgggatctctcggtcgtgccctttacgctgccccaatccagatttggg

SEQ ID NO: 15723 - DNA, 267 bp, Glycine max
  Clone ID: 701070438H1
cacaacttccacattccgatggaggagtcatgggaaaattggcatcttcatatggaaaccggttgcgagaacgatttcttaggcaagtgtcacggcactgacgatgacgagttcttcggagacatccttcagcaaccaccacctgtggctttctcttccgaaagcgaaaggctcactccttcctcgctgtccaaaacacttctagcatccccaacgacggtgccgttttgtctcctaggaattacctcgtcaaaagcagcagctcca

SEQ ID NO: 15724 - DNA, 278 bp, Glycine max
  Clone ID: 701070439H1
tatcgagccgctcgagccgcgcgtcgctccgcaccagtttcaccgcacgaatatcttcgttgtactggacgcgattcgcgagaataaacttctgtacaaccatgtttggtttaaccatgaacttccttacaggtgatgagcttctctctaattctttcggttacaaggaaattgagattggaatgctgtgggaagttgaggggaagtgggttgttaaaggagcagttgatgtagacattggtgcaaacccttctgctgagggtgaaggagaaattaag

SEQ ID NO: 15725 - DNA, 255 bp, Glycine max
  Clone ID: 701070441H1
ctagatttcccgcgtcatcttctctctctttttttctgtgtgtagtgtgcgaaaactttgatgagttggtcgacatgcagagagagaaagatggtgagaaaatggagacgaagggaagggttggtggcaaagattgaagggaacatatgggacacgttagtgcatgaaactgttgtggttatggattgttggggaaatgctaaaaaacaaaaattattactatatgatgaggatcccaaataacatcacctggtt

SEQ ID NO: 15726 - DNA, 146 bp, Glycine max
  Clone ID: 701070443H1
gcagagagaagagaagggctacacaaacacaatctctaatggcactcaggatgtgggcttcttccactgccaatgcactcaaactctcttctgtctccagacctcatctcttgcctctttttctttctccagatgcttaacctccg

SEQ ID NO: 15727 - DNA, 253 bp, Glycine max
  Clone ID: 701070445H1
atgaagcgagaagcgagaagcgacatggatccagacgcgttggcaaaggcattcgtggagcactactactccaccttcgacaacaaccgcaacaatctcgccaatctctaacaggacggttccatgctctctttcgagggtcagaagatccagggctcccaaaacatcgtcgccaaactcaactcccttcccttccaacagtggccgcaattcatcaacaacggcgagtcttcagccttcaggcgtcaaggcg

SEQ ID NO: 15728 - DNA, 158 bp, Glycine max
  Clone ID: 701070446H1
attaggacgcattaaagtcatacaaagcttagcgacgtgggtttcttccataattaagcatgattagtggaacacagaatgttattttggcggtaatagattagaggctgaatgatcatggattgatgactggtagtttcagcaatttgactaacttc

SEQ ID NO: 15729 - DNA, 99 bp, Glycine max
  Clone ID: 701070447H1
gtgatttcagtgagtgatcggtgttcacttgatctcatcataatcgtcagcgtcaattgaagaagatgccgatcagaaacatcgccgtcggaaggcctg

SEQ ID NO: 15730 - DNA, 187 bp, Glycine max
  Clone ID: 701070448H1
cagcgtagaacatgatcattcccgagaagaaccgtaaagagatctgcaaatacctcttccaagagggagtttgctttgcgaagaaggacttcaatctggcgaagacccggagattgtgtggcgaatctgcaagtgataaagccgatgccgaacctccaattccaagaagtacgtaagggaaacattt

SEQ ID NO: 15731 - DNA, 86 bp, Glycine max
  Clone ID: 701070449H1
cgcagtgttagggtttctgtagcctccaaccagaaagagagggcaatggctcccaaacatcctagtacgggtttgtttgttggatt

SEQ ID NO: 15732 - DNA, 123 bp, Glycine max
  Clone ID: 701070450H1
gtcatcaatgacaacaatgaagtgcttgtagtacaagagaggcattgttctccaacaactcttggtctttggaagataccaactggattcattcttgaggctgaggagatatatcaggagctg

SEQ ID NO: 15733 - DNA, 269 bp, Glycine max
  Clone ID: 701070451H1
gtttctccttttccctatactatattcaattatgccgtggtagtcacaaatatgaggttttggccctacttatgtggatcagtagctggcatggtaccagaacgtttcctctaaactacagtggtcggttcataaaggacttggccagaggcccataatgggaagcaccacttgactactgtggaaatcgtatacaacattattcctttcattattgcactagttaccactattgccttcactgtctatgccaaaaggagtctaaatcc

SEQ ID NO: 15734 - DNA, 267 bp, Glycine max
  Clone ID: 701070452H1
ataactagaaacagtgtgatgaaaatgaaggtccttgttttcttcgttgctacaattttggtagcatggcaatgccatgcgtacgatatgttccctctccgaatgaaaaatggtaagggtgccggaattcggaaggtgaatgcggcaatttggaggcttcctgtggaagcacacaacatctttggctttgagaccattcctgaagagtgcgttgaagcaacaaaggaatacatccatggcgaacaatatagatcagactccaaaaca

SEQ ID NO: 15735 - DNA, 247 bp, Glycine max
  Clone ID: 701070453H1
tagtggagatgttttcccaggctccacactttctgaccatgttttgcggtttaacaacataccacaggttaaaatgatggttgtacttggggaacttggtgggcgtgatgagtatctcctgtggaaagcctaaaaacaagggaaatgaattaaacaattggttgcttggttaacgggaacttttcaaggatcttcaaatctgaagtaccatttggtcatgctggagcttaaagttgttgttagatgg

SEQ ID NO: 15736 - DNA, 71 bp, Glycine max
  Clone ID: 701070454H1
attgaatcttgtgctctctatcaccgcaatggagactccttcatccacagcaagaagaatcacaagatccc

SEQ ID NO: 15737 - DNA, 262 bp, Glycine max
  Clone ID: 701070455H1
gcagcatcgctattctcttcattccatggctttgcccaaccaggaaaccgtggattacctagtttcaaactcgtatcgtcggcgatggtggcacaggaagacaactttgcgaaaagcatctccacggagaattcgagaagaaatatgaggccaccatcggtgttgaggttcaaccattggattttttcaccaactgtggaaagattcgattttactgctgggatactgctggacaggagaaatttggtggcctcagagatgg

SEQ ID NO: 15738 - DNA, 74 bp, Glycine max
  Clone ID: 701070456H1
aagccaccgtaccgtgttgcctctctgcaatctacagccaaaatgcctttcaagaggtacgttgagatcgggag

SEQ ID NO: 15739 - DNA, 259 bp, Glycine max
  Clone ID: 701070457H1
ctgaaagtgcgatatcctcagcgaattactattcttagaggaaaccatgaaagccgtcagatcactcaagtatatggattttacgatgaatgcctcagaaaatatggtagtgcaatggtttggaagaccttaactgacctttttgattcctttcggttgactgcattggttgagtccgaaatatttggtttgcatggtgggctttcacctccaattgagaccctggataccttaaggacctccgaccgggtccaggagg

SEQ ID NO: 15740 - DNA, 246 bp, Glycine max
  Clone ID: 701070458H1
atacctatggtgggtggggtgctcatggtggaggtgccttttcagggaaggatcctaccaaggttgacagaagtggtgcctatatcgtgaggcaggctgcaaagagtgttgtggcaatggccttgcccaaaaggtgccatggtccaggtttctaatgccattggtgtccctgagcccttgtcagtgtttgtggacacttatggaactgggaagattcctgacaaggagattctccaaattgtgaag

SEQ ID NO: 15741 - DNA, 142 bp, Glycine max
  Clone ID: 701070459H1
atctcggcagtataccgacactgaaaaccagagaaaagaaaagcaccttttttccgccattattggcccttcttgaaacttggtcatcaattgcgatgaaggactcaacatcttgacaacaacccatttcctaattggattg

SEQ ID NO: 15742 - DNA, 144 bp, Glycine max
  Clone ID: 701070460H1
ttgcgtcgtgtcgtgcgctgttcctctgtctgtcgtttttgttttcagaccaaaccctagctccgcatcgcaaccatgtcgaccaagcaaggtggaaaagctaagcctttgaaaaacccaagtctgataagaaggattacgacg

SEQ ID NO: 15743 - DNA, 180 bp, Glycine max
  Clone ID: 701070461H1
gtttatcaatggcacttctccacccaaatcttcttcccactttcaattccaacactcttacctttccttccatcaaactcaaaccctcactctcgcacgtgccttctccaaccccaaacgcttcagtctctctgtttccgcggcggaaaacaacggttttgccggcccttccaattccca

SEQ ID NO: 15744 - DNA, 101 bp, Glycine max
  Clone ID: 701070462H1
cgttggtgcaaagcatccttcgtttcaatttctctctctcagcgctttctgcaatcgaacctttcatctccaaagggatccacaggccgaatgagaaatgg

SEQ ID NO: 15745 - DNA, 96 bp, Glycine max
  Clone ID: 701070463H1
ctcagaactcaagcaaccaatttcaaatccaatcatggggagctcaaccttctgtgccttcttcctcctgtgtgcaatcttggccgtccacgtggc

SEQ ID NO: 15746 - DNA, 116 bp, Glycine max
  Clone ID: 701070464H1
ggcggctcgatgacacccttagcccaaccggatcttcacgattaggagatggctaagtcgaagaaccacaccgctcacaaccagtcctacaaggcccacaagaatgggatcaaaaa

SEQ ID NO: 15747 - DNA, 120 bp, Glycine max
  Clone ID: 701070465H1
gtgatatcagtgagtgatcggtgttcacttgatctcatcataatcgtcagcgtcaattgaagaagatgccgatcagaaacatcgccgtcggaaggcctgaagaggcgactcacccgacac

SEQ ID NO: 15748 - DNA, 139 bp, Glycine max
  Clone ID: 701070466H1
ccacattcgactccaaattggttgctggtcccaatggagggtctgctgggaagctcactgtcaaatacgaaacaaaaggagatgctgagcccaaccaagacgaactcaaaatggaaaagccaaggctgatgctctcttc

SEQ ID NO: 15749 - DNA, 181 bp, Glycine max
  Clone ID: 701070468H1
gttttgtcgtttgcttctttctttgattaatgatgactagctttaaggttgcatgtgtggttgcgatgatgtgcatggttgtcgccatgagtgttaaacccatgggcacaggcgcaatcacgtgcggggaagtcgccggcgaagtttcttcgtggcttcagtaacttcggaagcggcggaa

SEQ ID NO: 15750 - DNA, 98 bp, Glycine max
  Clone ID: 701070469H1
gtggacacagtcttgaaagcatcaaggctagcattgaagcaaggaagcctgattttgaagcatatattgatccacaaaagcaatacgccgatgcagtg

SEQ ID NO: 15751 - DNA, 110 bp, Glycine max
  Clone ID: 701070470H1
ggtaaagaaagagaagaaaagagtggaatcgaagacgaagacgaagatggaggacgcatcagcatcaaagttcatcccacagcaaatcggaggggtccaatacgacgtgc

SEQ ID NO: 15752 - DNA, 262 bp, Glycine max
  Clone ID: 701070471H1
ctttgttttaaaccgtaggaatcaaagacagataacagtgttttgttttttgggaccgcaattttggatgcagcgactatgtggccaaagttgtcacgaatttaaccccaaaacttcaaggttgcaacggaaccgcgaccatatagccacttaaaaccctgggttggtccttaatcgggttcccggtttggtggggtagggtagaaacttagaatctactgtgtttatgacttcaggaccaaaattgcgtcttgaggttgtt

SEQ ID NO: 15753 - DNA, 265 bp, Glycine max
  Clone ID: 701070472H1
ttaagcttgctactgagtttccacactgcataccttaggtcttccgaattcgaagttaatttgcaagatggctaaggaaaaggctcagatcaacattgtggtggttggtcagtggaccctgaggaggcaaccaccattaacgagctgaagaagcctgttgtggagaaagaagctccagggcatgccatatgagggcatgcacgtacggcctcggaggggaaccagaaaattatgttaacaaaataatctggaaccctaatgtatc

SEQ ID NO: 15754 - DNA, 138 bp, Glycine max
  Clone ID: 701070473H1
ccagatctctcacggcttgcatcttctcaggtaagtcgtgaagatgtacacatcaaggaagacaatccacaaggataaggatgctgaaccaactgagtttgaagagtcagtggaccagcattgtttcctctggaaaat

SEQ ID NO: 15755 - DNA, 102 bp, Glycine max
  Clone ID: 701070474H1
agaaaacggcactgcagccgtagaacgaaaaccgaccatggtgcacgtctccttttacaggaactatggtaagacgtttaagaacgccccgccgtccgtacg

SEQ ID NO: 15756 - DNA, 266 bp, Glycine max
  Clone ID: 701070475H1
gcacaaagggcgtaggagaagagggtttcgttccgtttcaatggggagcgaagagcagaacggcgaattctacctgcgttactacgtcggtcacaaaggcaagtttggtcagaattcctggaagtcgaatttcggcccaaacggcaagttcggttaggccaacaattccaattacaaaaacgacaccatcatccgcaaggaggtttacctaacccccgccgttctccgcgagtgccgtcgcatcatcgccgagagcgagattatga

SEQ ID NO: 15757 - DNA, 141 bp, Glycine max
  Clone ID: 701070476H1
ctcagtcaaccaattgggttaggtgttcaattttgagagacagactacgatacccggtgctttgcagtctatacagctcatacccaccttgcttactgatattggaatgtgtgtatggatggggtgttgcatccccaattt

SEQ ID NO: 15758 - DNA, 182 bp, Glycine max
  Clone ID: 701070477H1
cagaaaatcctcacccattttcttcgtagccaaacactctgaaattctcagttatgtcgtggcaagcgtatgtggatgatcacctactgtgtgaaatcgaaggtaaccacccaatcacgccgctatcatcggccaagacggaagcgtttgggctcagagcaacaacttccctccattcaaac

SEQ ID NO: 15759 - DNA, 144 bp, Glycine max
  Clone ID: 701070478H1
gcggaactttgcaacaagcatggagacagcctcagactatggagcattcacagagaaattcactttaccaccaaattctgcaccagctcttcctctcaaatcactcaactttgcagtgaaagaggttttcggcccgggagggta

SEQ ID NO: 15760 - DNA, 141 bp, Glycine max
  Clone ID: 701070479H1
cattggtctttcctgtgtatcagaggaaagccatggggatctcaattaggaatagcttagtgtatgtcctgctgttgtttgcattctgtgaaatggaaatcgttgcaagaaagacaatctaaactggccttttcggagaag

SEQ ID NO: 15761 - DNA, 140 bp, Glycine max
  Clone ID: 701070480H1
gggagtttcttcttggatcttaccctcttgtttgctaatattctcattcttctgtctctgcttcttctccttctgaactaagagatggggttgtctttcaacaagctttttagcgggtctttggtaaggaagaagtgcgg

SEQ ID NO: 15762 - DNA, 228 bp, Glycine max
  Clone ID: 701070482H1
ccgctgctgaatcaatcgttctcggttttcgcgtaatctagtcgttcatcccaaaatggtttgcttggcttgtttgctgcccctttttctggttccgatcgtcaaaatctccctcttctataataatttactattgggaaaatctatccgggttttgggttgggataccagaaaaccgagaagggtcctcctgtaaggtcataacaggcttccaaccaccagggttaa

SEQ ID NO: 15763 - DNA, 264 bp, Glycine max
  Clone ID: 701070483H1
gctttggttcagtattcagattattatacattgcaaaaatggcatcattcaccatgacagcttccatccttggctgcccagccgtcaccaaccggtcggcagcgacgagaggagatccgtggtaattgattccagccaccaaacctgtgaaaggggaaaaggccagttatgacaccaatggtaccaatgcaaggaggaacttgatgttcgccacggcggcggctgctgtttgctcttttgctgcagggatggcattggcagatg

SEQ ID NO: 15764 - DNA, 203 bp, Glycine max
  Clone ID: 701070484H1
cagagatgggttgaagaccgatcccaccaggtaccgcaagatgaaggagcgtctcgttggggtttctgaggacaacaccactggtgttaagaggctatatcagatgccagcgaatgggatctaattcttccttgtaattaatgtcaatgatctggttaccaagagcaagtttgacaacttgtacgggtgccgtcattctctcc

SEQ ID NO: 15765 - DNA, 177 bp, Glycine max
  Clone ID: 701070485H1
tccacactgcataccttaggtcttccgaattcgaagttaatttgcaagatggctaaggaaaaggctcagatcaacattgtggtggttggtcatgtggaccctgaggaggaaccaacattaacgaacttaaaaaagcttttgtggaaaaaaaaagttcaagggattgcattttaaggg

SEQ ID NO: 15766 - DNA, 236 bp, Glycine max
  Clone ID: 701070486H1
ctctcttccttccttctccacatcatttcaaatacacaaaaaaccctaacccccaattcatctctcttgaatcgaatcgatggcacgcatgggtccagggttccgattcaacccaccgacgaagctctggtggtgttctaacttaagcggaaaattacttgaaaactctcccggtacgaacaaatcgccgtcgttgacgtctaaaagctcgagccctgggaacttccctctctgtc

SEQ ID NO: 15767 - DNA, 263 bp, Glycine max
  Clone ID: 701070487H1
atttttcattgacacagatcggagcaatacccgaaggagtattaccctaacgatcaaacaatcaccagaagagtctcctcgtcctcttcgacgaccagcgtccacgtgcagccctagacggcctggtgaacgtcaactccctcttcacaatcgcagtgttcgtgggcctctccctgaccaacccgggccagcgcagctcgagaaccgctcctcctgcgacgccggtgtcgacgtggccaagaagcttctcgtcttcgaagtcg

SEQ ID NO: 15768 - DNA, 264 bp, Glycine max
  Clone ID: 701070488H1
ccgtgagacacaataaaaatcaaagagcataatgtcagggatcattcacaagattggcgagacccttcatgtgggacggcacaagaaggcggaggaacataagggtgaacacatgctggagaataccaaggggaacaacattgtgaacaccgtagtgagtacaaaggggagcatcatggtgaacaccaaactggagagtaccatggtgaacacaagccagagcacaaagaggggttcctagacaaagtcaaggacaagatccat

SEQ ID NO: 15769 - DNA, 224 bp, Glycine max
  Clone ID: 701070489H1
gcccccaaaacagagcaaaacagaggatccactccaccactactcctaatcgatcctccacccctctctgccgccactcaaaaaaaccatcccgaatcggtagagtcctttctccatgtttccgcgttgcggaaacgttgaatgatgagaatctaacggcggttccttgttccaaactgcggcttatgttcagcttaggttggcaaattattccaaggccttca

SEQ ID NO: 15770 - DNA, 252 bp, Glycine max
  Clone ID: 701070490H1
gcagaaatagagaaagagaaacgattgtctaatgtgaaggcttgggaagaaagtgaaaaatccaaagcagagaataaagcccaaaagcagctctctgctgttgctgcttggaaaacagccagaagccactccttgaagctcagctaagaaaatttgaggaccaactagagacaaagaaagcagattatggtgaaaaattgaaaaccaaattagccttagtccacaagcaggcggaggcgaggagagcattgg

SEQ ID NO: 15771 - DNA, 262 bp, Glycine max
  Clone ID: 701070491H1
gaaaatgtcgcagttgttggaaaaggccaaaaactatgttgcggagaaagtcaccaacatgcccaagccagaggcgagtgtcaccgacgtggacttcaagcgcgtgagcgcgaaaaggtcgagtaatttggcaaaggcctcggttcaaaaccctaatcccacttcaattcccatttgtgagatcaagtactccctcaaaagtgctggcagggagatagcagcaggaacaatacctgacccagggtcattgaaggcaagtgac

SEQ ID NO: 15772 - DNA, 145 bp, Glycine max
  Clone ID: 701070492H1
gagaaatgagaattcgtcattggctgagtccttctgatgcatgtggccctgccaaacgcagaagctccggcagaaattgccaccgcaaacacgtcgaagacgggtagtatagcactcggtttcattctcccaaattcccaattct

SEQ ID NO: 15773 - DNA, 266 bp, Glycine max
  Clone ID: 701070494H1
cactaaaccaaagtaagaggtatagtgttctaagagtgagccacttgtgagacatggcttccaaggctgcacttctcttgtgtctcaatggtctctttttcactgtggttattccacatatgttgcatttaattcaacccccaaaaattcccaaaaaccaacttgtcccaaagctacaatccccaaagttagcaagctgccccaaagacactattaagttcggtgtgtgtgctgatgtgttaggtttgattaatgtgcaacttggg

SEQ ID NO: 15774 - DNA, 184 bp, Glycine max
  Clone ID: 701070495H1
ccttcttctccgcttcctcttcgatcatcgcttcagaatgccgccgaagttcgacccctcccagatcgtcgacgtcttcgtacgcgtcaccggcggtgaagtccgcgccggaattccctccccccgaaaatccgtccccttcggcttttccccaaaaagattcggagaggttttcgccaaggaa

SEQ ID NO: 15775 - DNA, 253 bp, Glycine max
  Clone ID: 701070496H1
gttcggattgcggcgacgtgagcggttcgctgcccgcgacgttgtgagaagtccactgaaccttatcatttagaggatgggatgaaggtgtgcttggcatgcaaattggtgcagttgctcgtctccggtgctctccggattatgcttatggtgctggtggctttccttcctgggggatacaggccaactcaggcctggaatttggaatcggagtcctgaattccccattgaaaaccttggaatccggccccgg
